(19) United States
(12) Patent Application Publication
(10) Pub. No.: US 2019/0376067 A1
(43) Pub. Date: Dec. 12, 2019

(54) COMPOSITIONS, METHODS AND USES FOR MULTIPLEXED TRACKABLE GENOMICALLY-ENGINEERED POLYPEPTIDES

(71) Applicant: The Regents of the University of Colorado, a Body Corporate, Denver, CO (US)

(72) Inventors: Ryan T. Gill, Boulder, CO (US); William Grau, Denver, CO (US)

(21) Appl. No.: 16/485,333

(22) PCT Filed: Feb. 13, 2018
(86) PCT No.: PCT/US18/18073

§ 371 Date: Aug. 12, 2019

Related U.S. Application Data
(60) Provisional application No. 62/458,483, filed on Feb. 13, 2017.

(51) Int. Cl. C12N 15/52; C12N 15/70; G16B 25/00; C40B 50/10; C40B 40/08; C12N 15/10

(52) U.S. Cl. CPC C12N 15/52; C12N 15/70; G16B 25/00; C12N 9/10; C40B 40/08; C12N 15/1072; C12N 2310/20; C40B 50/10

(57) ABSTRACT

Embodiments herein concern compositions, methods, systems and uses for in vivo selection of optimum target proteins of use in designing genomically-engineered cells or organisms. Some embodiments relate to compositions and methods for generating constructs mimicking benefits of megasynthases in a non-natural organism or cell of use in systems and methods disclosed herein. Yet other embodiments relate to compositions and methods for generating agents using constructs disclosed herein of use in treating genetically-linked conditions.

### PRIORITY

[0001] This PCT application claims the benefit under 35 USC § 119(e) of provisional U.S. patent application Ser. No. 62/458,483 filed on Feb. 13, 2017, which is incorporated herein by reference in its entirety for all purposes.

### STATEMENT REGARDING GOVERNMENT FUNDING

[0002] This invention was made with government support under grant number DE-SC0008812 awarded by the U.S. Department of Energy. The government has certain rights in the invention.

### FIELD

[0003] Embodiments herein report compositions, systems, methods, and uses for generating comprehensive in vivo libraries related to genetic variations for producing target molecules such as proteins, peptides, polypeptides, target agents, small molecules and chemicals. In certain embodiments, target molecules can be prokaryotic or eukaryotic target polypeptides, peptides, proteins or other agents of use in a variety of applications. In other embodiments, target molecules can be generated related to producing biofuels, biotech agents and biopharmaceutical agents or chemicals of use for small or large scale production or screening. Some embodiments of the present disclosure include creating genetic constructs using conserved domains (e.g. catalytic domains) associated with other conserved domains (e.g. catalytic domains) capable of generating a target molecule(s) of interest. Other embodiments include methods of generating such constructs. Yet other embodiments herein report systems that can include computer generated/created or analyzed platform technology construct systems having input and/or output parameters and/or methodologies for assessing and compiling certain target molecule pools. In some embodiments, constructs can include catalytic domains derived from megasynthases, rearranged in a non-naturally occurring order linked together to form constructs for producing target molecules and mixtures of related target molecules.

### REFERENCE TO SEQUENCE LISTING

[0004] This application contains a Sequence Listing submitted via EFS-web and is hereby incorporated by reference in its entirety for all purposes. The ASCII copy, created for this application is named 20180213_466888.61_SEQUENCE_LISTING_ST25 and is 2.53 MB in size.

### BACKGROUND

[0005] Many natural products are synthesized by elaborate pathways using enzymes, frequently using a particular class of enzymes. Some of these natural products are synthesized by enzymes referred to as megasynthases. Predictable combinatorial biosynthesis of such megasynthases, including using re-programmable megasynthases to produce certain molecules, is of particular interest due to the broad uses of the resultant natural products from these enzymes such as chemicals with pharmaceutical, flavor, and/or fragrance applications.

[0006] Combinatorial biosynthesis of megasynthases is a challenge as it requires manipulation of large DNA constructs. A fundamental limitation to synthetic biology and genome engineering practices is the inability to effectively manipulate complex phenotypes, for which the relevant combinatorial mutational space is often much larger than can be searched on laboratory time scales.

[0007] Microbial genomes hold the potential for creating extraordinary combinatorial diversity. Searching these variations for specific genetic features that affect pertinent target molecules and traits remains limited by the number of individual variations that can be identified and tested at a time, which is a very small fraction of all possibilities. This issue has been studied at the level of individual mutations, where high-throughput methods for introducing specific mutations in residues and then mapping the effect of such mutations onto target molecule activity are available. Yet other impeding issues are that use of these enzymes (e.g. megasynthases) in non-natural organisms (e.g. bacteria) fail to produce functioning enzymes once combinatorial and genetic manipulations are introduced.

### SUMMARY

[0008] Embodiments disclosed herein concern compositions, systems, methods, and uses for generating comprehensive in vivo libraries related to genetic variations for producing target molecules such as proteins, peptides, polypeptides, target agents, small molecules and chemicals. In certain embodiments, target molecules can be prokaryotic or eukaryotic target polypeptides, peptides, proteins or other agents of use in a variety of applications. In certain embodiments, target molecules can be generated related to producing biofuels, biotech agents and biopharmaceutical agents or small molecules or chemicals of use for small or large scale production or screening. Some embodiments of the present disclosure include creating genetic constructs using conserved domains (e.g. catalytic domains) associated with other conserved domains (e.g. catalytic domains) selectively linked to one another that are capable of generating a target molecule(s) of interest. Some embodiments of the present disclosure include creating genetic constructs capable of generating a target molecule or family of related molecules. Other embodiments include methods of generating such constructs.

[0009] Other embodiments disclosed herein report systems that can include computer generated/created and/or analyzed platform technology construct systems having input and/or output parameters and/or methodologies for assessing and compiling target molecule pools or families. In some embodiments, these systems can include a computer-readable medium, the computer-readable medium having computer-readable instructions, which, when executed by a computer, cause the computer to carry out a method. In some embodiments, the method can include multiple steps, those steps including (1) receiving a first gene(s) or genetic segment score representing a score of a biological effect or condition due to a genetic variation of a gene or gene segment of a target protein, (2) receiving at least a second gene(s) or genetic score representing a second score of another genetic variation of the target protein, (3) combining the scores; and (4) assigning a combined score related to one or more genetic variations in order to assess a value of the genetic variations related to a trait for the target protein. In other embodiments, the computer-readable medium can further include designing a genomically-engineered organism or cell based on the composite scores for two or more genes or genetic loci. In some embodiments, information related to more than one target gene can be received and assessed by the computer-readable medium.

[0010] In certain embodiments, constructs can include catalytic domains of known enzymes rearranged and linked to form non-naturally occurring constructs for producing target molecules and mixtures of related target molecules of use as pharmaceutical agents. In some embodiments, constructs can include catalytic domains derived from megasynthases, rearranged in a non-naturally occurring order linked together to form constructs, often modular megasynthases, for producing target molecules and mixtures of related target molecules.

[0011] Other embodiments disclosed herein generally relate to compositions, systems and methods for compiling and assessing mutational libraries of one or more target protein(s). In some embodiments, one or more target proteins can be a prokaryotic protein or a eukaryotic protein. In other embodiments, target proteins and domains thereof of use in constructs of certain embodiments herein can include, but are not limited to, modular megasynthases, polyketide synthases (PKS), non-ribosomal peptide synthases (NRPS), and/or PKS-NRPS hybrids.

[0012] Certain embodiments herein concern constructs for compiling an in vivo library of one or more target proteins and domains thereof. Other embodiments disclosed herein can include one or more constructs having a non-naturally occurring polypeptide or polynucleotide. In yet other embodiments, constructs disclosed herein can have a formula: (X—B)ₙ—Z, where X is at least one polypeptide encoding at least one domain of a first target protein or enzyme complex; Z is at least one polypeptide encoding at least one domain of a second target protein or enzyme complex; B is a polypeptide capable of linking X and/or Z or multiple domains of X and/or Z; and n is from 1 to 100. In certain embodiments, n can be 1, 2, 3, 4, 5, 6, 7, 8, 9, 10, 11, 12, 13, 14, 15, 16, 17, 18, 19, and/or 20 or up to 100. In accordance with these embodiments, the first or the second target protein can be the same or different target protein(s). In other embodiments, X and Z can be the same or different domain(s) of the first or the second target protein. In accordance of these embodiments, an in vivo library can include, but is not limited to, more than 10, 100, 1000, or 10,000 non-naturally occurring polypeptides having the formula: (X—B)ₙ—Z. In other embodiments, these non-naturally occurring polypeptide libraries can contain barcoded members for tracing the polypeptides of interest.

[0013] In certain embodiments, a construct contemplated herein can include one or more polypeptides that encode linker domains of one or more target polypeptides. In accordance with these embodiments, linker domains can include but are not limited to, Acyl Carrier Protein-Condensation Domain linkers (ACP Condensation), Acyl Carrier Protein-Heterocyclization Domain linkers (ACP Heterocyclization), Acyl Carrier Protein-Ketosynthase Domain linkers (AC-PKS), Acyl Carrier Protein-Thioesterase Domain linkers (ACP-TE), Adenylation Domain-Peptide Carrier Protein linkers (A-PCP), Acyltransferase Domain-Acyl Carrier Protein linkers (AT-ACP), Acyltransferase Domain-Dehydratase Domain linkers (AT-DH), Acyltransferase Domain-Ketoreductase Domain linkers (AT-KR), Condensation Domain-Adenylation Domain linkers (Condensation A), Dehydratase Domain-Enoylreductase Domain linkers (DH-ER), Dehydratase Domain-Ketoreductase Domain linkers (DH-KR), Dual Condensation/Epimerization Domain-Adenylation Domain linkers (Dual Condensation A), Enoylreductase Domain-Ketoreductase Domain linkers (ER-KR), Heterocyclization Domain-Adenylation Domain linkers (Heterocyclization A), (Both Acyl and Peptide) Carrier Protein-Condensation Domain linkers (Joint AC-PC), Ketoreducatse Domain-Acyl Carrier Protein linkers (KR-ACP), and Ketosynthase Domain-Acyltransferase Domain linkers (KS-AT). In certain exemplary embodiments, B of the formula, (X—B)ₙ—Z, can include one or more of these linker domains. In certain embodiments, domain linker can be about 10 to about 500 amino acids long. In other embodiments, domain linker sequences can be about 10 to about 450 amino acids long. In yet other embodiments, domain linker sequences can be categorized by a linker type.

[0014] In some embodiments, an exemplary construct can include at least 70, 75, 80, 85, 90, and/or 95 percent identity to at least one of the sequences referenced as SEQ ID NOs: 65-82, 108-143. In certain embodiments, an exemplary construct can include at least one sequence or fragment of a sequence represented by SEQ ID NOs: 108-143, for generating target molecules. In certain embodiments, constructs can be generated using two or more domains of an exemplary polypeptide, protein or enzyme. In accordance with these embodiments, the two or more domains of a target polypeptide, protein or enzyme can be modular megasynthases, polyketide synthases and/or non-ribosomal peptide synthases or hybrid molecules thereof. In certain embodiments, two or more domains of an exemplary target protein or enzyme can be two or more catalytic domains of an exemplary target protein or enzyme. In some embodiments, an exemplary construct can include at least 70, 75, 80, 85, 90, and/or 95 percent identity to at least one sequence represented by SEQ ID NOs: 33-64, or 108-143. In certain embodiments, an exemplary construct can include at least one of the sequences represented by SEQ ID NOs: 33-64, 109, 111, 113, 115, 117, 119, 121, 123, 125, 127, 129, 131, 133, 135, 137, 139, 141, 143 for generating target molecules.

[0015] In other embodiments, a construct contemplated herein can include one or more polypeptides that encode catalytic domains of one or more target polypeptide, protein or enzyme. In accordance with these embodiments, catalytic domains can include, but are not limited to, Acyltransferase (AT), Acyl Carrier Protein (ACP), Keto-Synthase (KS), Ketoreductase (KR), Dehydratase (DH), Enoylreductase (ER), Methyltransferase (MT), Sulfhydrolase (SH), and/or Thioesterase (TE). In certain exemplary embodiments, X and Z of the formula, (X—B)ₙ—Z, can include one or more of these catalytic domains. In other embodiments, X and Z can be the same or different domain(s) of the first or the second target polypeptide, protein or enzyme.

[0016] In certain embodiments, constructs generated herein are capable of synthesizing a secondary metabolite in a host (e.g. organism, microorganism or cell). The secondary metabolite can include, but are not limited to,

[chemical structure]

[chemical structure]

[chemical structure]

[chemical structure]

[0017] In some embodiments, constructs generated herein are capable of synthesizing a secondary metabolite, wherein secondary metabolites can include organic compounds not directly involved in normal growth, development, or reproduction of an organism (e.g. host organism). In certain embodiments, secondary metabolites can include natural or non-natural products or natural or non-natural molecules with chemical (e.g. fine chemical), pharmaceutical, flavor, or fragrance applications. In certain embodiments, secondary metabolites can include target molecules of polyketides, non-ribosomal peptides, and/or polyketide-non ribosomal peptide hybrids. In other embodiments, a secondary metabolite can include delta-hexalactone. In yet other embodiments, a secondary metabolite can include Rapamycin. In still other embodiments, a secondary metabolite can include Actinorhodin. In other embodiments, secondary metabolite can include Erythromycin A. In yet other embodiments, a secondary metabolite can include 6-Methylsalicylic acid. In certain embodiments, a secondary metabolite can include Aflatoxin B1. In further embodiments, a secondary metabolite can include Rifamycin S. In some embodiments, a secondary metabolite can include Lovastatin. In other embodiments, a secondary metabolite can include Amphotericin B. In other embodiments, a secondary metabolite can include Monensin A.

[0018] Some embodiments herein concern constructs for compiling an in vivo library of one or more target molecules for synthesis in a microorganism. In accordance with these embodiments, constructs can be generated that encompass one or more genetic variation(s) of a gene or gene segment corresponding to a target catalytic domain of a polypeptide or protein (e.g. enzyme). In certain embodiments, the construct can include a barcode or a tag for trackability. In other embodiments, the barcode can be positioned outside of the open reading frame of the gene or gene segment. It is contemplated that these comprehensive libraries can be generated for any eukaryotic or prokaryotic polypeptide, protein, trait or pathway, chemical or small molecule. In certain embodiments, engineered cells or organisms (e.g. microorganisms) can be used to produce constructs contemplated herein.

[0019] Certain embodiments can include a non-naturally occurring polynucleotide encoding a construct having the formula: (X—B)ₙ—Z, as disclosed above. In accordance with these embodiments, the first or the second target protein can be the same or different target protein(s). In other embodiments, X and Z can be the same or different domain(s) of the first or the second target protein. In accordance with these embodiments, X and Z can be the same or different catalytic domain(s) of a megasynthase. In accordance with these embodiments, B can be a linker selected from naturally-occurring or non-naturally occurring linkers of megasynthase catalytic domains that when assembled with X and Z form a non-naturally occurring megasynthase construct capable of creating novel constructs for producing target agents in a cell or organism. In certain embodiments, the polynucleotide encoding the construct having the formula: (X—B)ₙ—Z can be created by codon optimization or codon harmonization.

[0020] In some embodiments, polynucleotides disclosed herein include, but are not limited to, a traceable barcode positioned outside of the gene or the gene segment open reading frame, wherein the traceable barcode corresponds to or is quantitatively linked to a genetic variation of the gene or the gene segment. In accordance of these embodiments, an in vivo library or trackable library can include, but is not limited to, more than 10, 100, 1000, or 10,000 non-naturally occurring polynucleotides encoding the construct having the formula: (X—B)ₙ—Z. In accordance with these embodiments, a trackable library can include a barcoded library.

[0021] In other embodiments, an exemplary polynucleotide encoding the construct having the formula: (X—B)ₙ—Z can include at least 70, 75, 80, 85, 90, and/or 95 percent identity to at least one of the sequences referenced as SEQ ID NOs: 1-32, 108, 110, 112, 114, 116, 118, 120, 122, 124, 126, 128, 130, 132, 134, 136, 138, 140, 142. In certain embodiments, an exemplary (X—B)ₙ—Z construct can include at least one of the sequences represented by SEQ ID NOs: 1-32, 108, 110, 112, 114, 116, 118, 120, 122, 124, 126, 128, 130, 132, 134, 136, 138, 140, 142 for generating target molecules.

[0022] Other embodiments herein concern methods for generating a construct of the formula, (X—B)ₙ—Z, disclosed herein. In accordance with these embodiments, a method can include obtaining at least one polypeptide sequence encoding at least one domain (e.g. catalytic) of one or more target proteins; determining a linker sequence capable of linking the at least one polypeptide encoding at least one domain of the one or more target protein to the linker; and generating a construct having the at least one polypeptide sequence on either side of a linker sequence. In other embodiments, determining a linker sequence further includes creating a gene cluster annotation of a target gene, and/or converting a construct having an amino acid sequence into at least one nucleotide sequence using codon harmonization.

[0023] Certain embodiments herein concern assessing and scoring genetic variations of genes or gene segments of one or more target proteins that affect one or more residue of the target protein(s). In accordance with these embodiments, constructs can be traced to one or more variation positively affecting protein function and that contribute to an overall trait. In accordance with these embodiments, these variations can be selected for and used for creating modulated engineered biologics, biopharma products, cells, or organisms having or producing a construct disclosed herein.

[0024] Yet other embodiments disclosed herein provide methods for generating a target molecule using a CRISPR enabled trackable genome engineering (CREATE) vector having an editing cassette and/or at least one guide RNA (gRNA). The editing cassette can include a region which is homologous to a target region of a nucleic acid in the cell, a mutation of at least one nucleotide relative to the target region, and/or a protospacer adjacent motif (PAM) mutation. In some embodiments, the CREATE editing cassette introduces a silent PAM mutation that protects from CRISPR cutting, coupled to the target mutation. The gRNA can include a region complementary to a portion of the target region and/or a region that recruits a Cas9 nuclease. A CREATE vector can be used to make a targeted and trackable genomic mutation. In some embodiments, CREATE can be used to change the ‘chassis’ substrate specificity, altering AT and A domain specificities, expanding the biosynthesis library from 32 to >10000 members.

[0025] In certain embodiments, an organism can be a eukaryotic cell or a microorganism (e.g. bacteria, yeast, fungus, or other microorganism) capable of being genomically-engineered or manipulated, for example, for improved synthesis or production of a byproduct of the organism or synthesis or production of a novel molecule. In other embodiments, compositions and methods disclosed herein are directed at producing genomically-engineered eukaryotic or prokaryotic cells, for example, cancer cells, product-producing cells (e.g., insulin, growth factors, and other biologics), tissue cells and others known in the art. In yet other embodiments, compositions and methods disclosed herein are directed at producing genomically-engineered microorganisms, for example, bacteria (e.g., E. coli). In accordance with these embodiments, bacteria can be engineered to house a construct (e.g. a construct of the formula, (X—B)ₙ—Z) disclosed herein in order to product target agents.

[0026] Trackable agents contemplated of use in any of the disclosed compositions or methods can include, but are not limited to barcodes. In accordance with these embodiments, barcodes can be, but are not limited to, DNA sequences (e.g., 20-1,000 nucleotides in length) or other agents known by those skilled in the art. Because barcodes can be physically linked to a specific allele cassette they can be used to track the presence of each synthetic oligo as well as track each engineered cell or microorganism within a mixed population. In other embodiments, barcodes can be further selected to exclude sequences that would lead to cleavage of DNA during library synthesis and sequences that contain more than six bases identical to the regions used to amplify the tag sequences.

[0027] Some embodiments disclosed herein can include modifying microorganisms or cells to express one or more construct (e.g. conserved or mutated domain). In accordance with these embodiments, a mutated domain can be a mutated catalytic domain originating from a catalytic domain of a megasynthase. These manipulated cells or microorganisms can then be selected to produce known or novel target agents such as small molecules, biopharma agents, biofuels, fusion molecules, recombinants or biologics.

### DESCRIPTION OF ILLUSTRATIVE EMBODIMENTS

### Definitions

[0028] As disclosed herein “modulate” can mean an increase, a decrease, upregulation, downregulation, an induction, a change in encoded activity, a change in stability or the like, of one or more of targeted genes or gene clusters.

[0029] As disclosed herein “module” can mean a specific sequence of DNA designed to have a specific effect when introduced to a cell. The effect could be to target the module to a specific part of the genome or to a specific cellular location, to result, in for example, a modulation as defined above, or to enable easier quantification via genomics technologies among others.

[0030] As disclosed herein “measurement of biological effect” can be a comparison of one cellular trait resulting from one genetic variation with respect to another cellular trait resulting from a second genetic variation or compared to a control with no variation. Examples of measurement of biological effect include, but are not limited to, comparison of the rate of growth of two cell types, comparison of the color of two cell types, comparison of the fluorescence of two cell types, comparison of a metabolite concentration within two cell types, comparison of lag phase of two cells types, comparison of the survival of two cell types, comparison of the consumption of a an agent by two cell types, comparison of production rates of an agent of two cell types, comparison of two or more mutations on a target protein, analysis of effects of a protein activity due to genetic variation and other parameters.

[0031] As disclosed herein, a secondary metabolite can mean an organic compound that is not directly involved in the normal growth, development, or reproduction of an organism.

[0032] As disclosed herein “genetic modification” or “genetic variation” can mean any change(s) to a composition or structure of DNA (whole genes or gene segments) with respect to its function within an organism. Genetic modification examples include, but are not limited to, deletion of nucleotides from cell, insertion of nucleotides to cell, rearrangement of nucleotides or changes that create an amino acid change in a protein coded form by the DNA.

[0033] As disclosed herein “multiplex modification” can mean creating two or more genetic modifications in the same experiment. These modifications can occur within the same cell or within separate cells.

[0034] As disclosed herein “tracking” can mean any nucleotide sequence that can be used to identify or trace a genetic modification, directly or indirectly. Examples of tracking include, but are not limited to, nucleotide sequences that can be identified by sequencing technologies, nucleotide sequences that can be identified by hybridization technologies, nucleotide sequences that create a bioproduct that can be identified, such as a protein identified by proteomic technologies or molecule identified by common analytical techniques (e.g., chromatography and/or spectroscopy).

[0035] As disclosed herein “functional module” can mean any nucleotide sequence inserted, rearranged, and/or removed at genetic locus (loci). A functional module elicits primary effect(s) on gene loci (locus) that can be predicted or anticipated. Functional module examples and corresponding primary effects include, but are not limited to, insertion of a promoter that cause a change of RNA transcription, alteration of nucleotides involved in translation initiation, deletion of nucleotides that make up part/all of the reading frame of a gene resulting in loss of gene product, insertion of sequence that causes a change in gene product, and deletion of sequence that interacts with a small molecule that causes an effect to be less dependent on the small molecule.

[0036] As disclosed herein “vector” can be any of a variety of nucleic acids that include a sought-after or target sequence or sequences to be delivered to or expressed in a cell or organism. The sought-after sequence(s) can be included in a vector, such as by restriction and ligation or by recombination. Vectors can typically be composed of DNA, although RNA vectors are also available. Vectors include, but are not limited to: plasmids, fosmids, phagemids, virus genomes and artificial chromosomes.

### BRIEF DESCRIPTION OF THE FIGURES

[0037] The following drawings form part of the present specification and can be included to further demonstrate certain embodiments of the present disclosure. The embodiments can be better understood by reference to one or more of these drawings in combination with the detailed description of specific embodiments presented herein.

[0038] FIG. 1 represents a model of clustering analysis for various linkage classes of use in embodiments described herein (provided in color upon request).

[0039] FIG. 2 is a schematic diagram representing a method for generating a construct of one embodiment described herein.

[0040] FIG. 3 is a schematic diagram representing loading modules, extension modules, and the naming scheme of an exemplary construct.

[0041] FIG. 4 represents schematic diagrams illustrating: computational mining and linker design; and gene design and assembly of some embodiments described herein.

[0042] FIG. 5A represents a schematic diagram illustrating exemplary computational mining for potential linker sequences of use in constructs contemplated herein, as used in methods disclosed herein.

[0043] FIG. 5B represents a schematic diagram illustrating a design of a target linker, as described in exemplary embodiments herein.

[0044] FIG. 6A illustrates an exemplary targeted design of a construct (e.g. modular megasynthase), of one embodiment of the instant disclosure.

[0045] FIG. 6B illustrates a linker region from computational mining compared to a linker from known structures of some embodiments described herein.

[0046] FIG. 6C illustrates a linker region from computational mining compared to a linker from known structures of some embodiments described herein as derived from FIG. 6B.

[0047] FIG. 7A-7D represents an exemplary process illustrating: 7A) codon harmonization and synthesis of fragments by methods known in the art as used in exemplary embodiments herein; 7B) yeast cloning of exemplary fragments; 7C) second step yeast cloning of exemplary fragments and 7D) integration of exemplary fragments into a genome of a microorganism of some embodiments described herein.

[0048] FIG. 8A-8C illustrate: 8A) the mass spectrum of a target metabolite as compared to a control; and 8B-8C: the mass spectrum of a target molecule against a standard of the same molecule to demonstrate synthesis using some exemplary methods described herein.

[0049] FIG. 9 illustrates target molecules produced by an exemplary construct expressed in an exemplary microorganism using embodiments disclosed herein.

[0050] FIG. 10 illustrates one strategy for combinatorial assembly of barcoded exemplary enzymes (e.g. modular megasynthases) of certain embodiments disclosed herein.

[0051] FIG. 11A-11B illustrates a method for generating a mutated enzyme construct of certain embodiments disclosed herein using gene editing of certain embodiments disclosed herein.

[0052] FIG. 12A illustrates a block diagram for certain exemplary linker sequences in color-coded blocks (provided in color upon request) of certain embodiments disclosed herein.

[0053] FIG. 12B illustrates an exemplary ketosynthase-acyltransferase linker sequence of use in certain constructs of various embodiments disclosed herein.

[0054] FIG. 13A represents schematic diagrams illustrating CRISPR Enabled Trackable Genome Engineering (CREATE) cassette and design of use for constructs of certain embodiments disclosed herein.

[0055] FIG. 13B illustrates Protospacer Adjacent Motif (PAM) mutation and editing introduced to certain constructs (e.g. a catalytic domain) of constructs of certain embodiments disclosed herein.

[0056] FIG. 13C illustrates a CREATE strategy of use for certain embodiments disclosed herein.

[0057] FIG. 14A illustrates an exemplary method using in vivo gene editing referred to as CREATE of use for certain embodiments disclosed herein.

[0058] FIG. 14B illustrates an exemplary mutation generated in an exemplary target molecule using CREATE for certain embodiments disclosed herein.

[0059] FIG. 15 illustrates use of a barcoded-Tracking Combinatorial Engineering (bTRACE) system of some embodiments described herein.

### DETAILED DESCRIPTION

[0060] In the following sections, various exemplary compositions and methods are described in order to detail various embodiments of the disclosure. It will be obvious to one skilled in the art that practicing the various embodiments does not require the employment of all or even some of the details outlined herein, but rather that concentrations, times, temperature and other details can be modified through routine experimentation. In some embodiments, well known or previously disclosed methods or components have not been included in the description.

[0061] In accordance with embodiments of the present invention, there can be employed conventional molecular biology, microbiology, and recombinant DNA techniques within the skill of the art. Such techniques are explained fully in the literature. See, e.g., Sambrook, Fritsch & Maniatis, Molecular Cloning: A Laboratory Manual, Second Edition 1989, Cold Spring Harbor Laboratory Press, Cold Spring Harbor, N.Y.; Animal Cell Culture, R. I. Freshney, ed., 1986) as well as other techniques known in the art applicable to embodiments disclosed herein.

[0062] Certain embodiments disclosed herein concern compositions, systems, methods, and uses for generating comprehensive in vivo libraries related to genetic variations for producing target molecules such as proteins, peptides, polypeptides, target agents, small molecules and chemicals. In certain embodiments, target molecules can be prokaryotic or eukaryotic target polypeptides, peptides, proteins or other agents of use in a variety of applications. In other embodiments, target molecules can be generated related to producing biofuels, biotech agents and biopharmaceutical agents or chemicals of use for small or large scale production or screening using combinatorial enzyme biosynthesis systems disclosed herein.

[0063] To date, combinatorial enzyme biosynthesis efforts have been limited by a lack of tools for designing, building, and testing target complex enzymes of use in production of target molecules. For example, megasynthases are complex multienzyme complexes. These multienzyme complexes are protein complexes having multiple catalytic domains connected together with structured linker regions in a single polypeptide chain to permit functionality of the catalytic domains. Megasynthases are the foundation of many biological processes and perform a vast array of biological functions. Linker regions of megasynthases confer the requisite structure for constructive interactions between catalytic domains and groups of catalytic domains (modules) in order to perform a variety of tasks within an organism. In part, lack of attention to these linker regions has been implicated as one issue in the limited successes of previous studies using these complex enzymes in combinatorial biosynthesis. For example, linker sequences of megasynthases as well as their combination with particular catalytic domains are critical for proper function or manipulation to form “modular” megasynthases (a non-naturally occurring megasynthase) capable of producing target molecules of constructs disclosed herein. Megasynthases are fairly simple regarding their hierarchical and modular architecture, but have not been as easily re-programmable as anticipated due-in part-to their complex structure and dynamics. As such, advances in synthetic biology have not, until the instant disclosure, been previously implemented as a framework for the construction of “modular” megasynthases which begins with designing a set of all potentially required parts (e.g. catalytic domains and corresponding linker regions) and the hierarchical assembly of these parts into a variety of “modular” megasynthases (hereinafter “modular megasynthases”). Embodiments herein provide for a highly efficient, scalable platform approach to creating modular megasynthase design and assembly for combinatorial biosynthesis as scaffold for production of a multitude of target molecules.

[0064] Embodiments herein provide for a platform technology that can be used to design a set of context-independent parts that behave predictably, regardless of the broader enzyme design, enabling simple, scalable, and combinatorial assembly of multienzyme complexes, such as reprogrammable modular megasynthases of use to produce target molecules. In certain embodiments, this platform can include a computational design pipeline for context-independent linker sequences that, when combined with the predetermined catalytic domains (e.g. of a modular megasynthase) using various techniques known in the art, can be assembled leading to a system for producing novel molecules in a microorganism or a cell.

[0065] In certain embodiments, compositions, methods and used for creating “reconfigured” modular megasynthase constructs (i.e. non-naturally occurring modular megasynthases) for combinatorial biosynthesis for diverse generation of these constructs through the use of genome engineering tools are disclosed. As disclosed herein, diversity can be generated at different levels of construction of the hierarchical architecture of these synthetic or unnatural modular megasynthases. In accordance with these embodiments, diversity can be generated in order or alignment of modules (e.g. domains) within a gene; selection based on function of the modules; and substrate specificity of selected modules. In certain embodiments, using design of modules (catalytic domains and linker domains) with varied function and mixing and matching of target modules diversity of the system can be generated. In other embodiments, diversity can be generated through methods disclosed herein such as alteration of the module substrate specificity through in vivo genome engineering. Yet other embodiments include methods for creating mutations within the modules of use to further diversify target molecules produced by constructs described herein. One advantage of this approach is creating methods that do not require the cloning of a targeted construct for synthesis of the target molecules. In certain embodiments, methods disclosed herein can use CREATE, a CRISPR-based technology for synthesizing constructs which contain an editing cassette and CRISPR-RNA sequentially for example, of use for creating mutants and other constructs.

[0066] Understanding relationships between a protein's amino acid structure and function is critical in protein engineering efforts, which are increasingly commonplace in almost all drug development programs (e.g., whether focused on protein-based therapies or enzyme driven synthesis of pharmaceutical products). In certain embodiments, protein design criteria grow increasingly stringent, including efforts to simultaneously alter multiple characteristics of a target protein such as stability, catalytic activity, target specificity, pharmacokinetic activity, shelf-life, among others depending on the application.

[0067] Megasynthases are composed of sets of domains that sequentially catalyze various reactions, ultimately leading to compounds that are non-essential to growth, development, or reproduction of a host organism (e.g., secondary metabolites). Sub-classes of megasynthases can include, but are not limited to, polyketide synthases (PKSs) and non-ribosomal peptide synthases (NRPSs).

[0068] Polyketide synthases (PKSs) are a family of multifunctional enzymes that assemble the core structures of polyketides via the sequential Claisen-like condensations of extender units derived from carboxylated acyl-CoA precursors in a linear fashion. At minimum, each module of a PKS contains covalently-linked ketosynthase (KS), acyltransferase (AT), and acyl-carrier protein (ACP) domains. There are also optional tailoring domains such as ketoreductase (KR), dehydratase (DH), and enoylreductase (ER) domains that incorporate different functionality into the polyketide. In addition, there is a distinct logic to the organization of catalytic domains within each PKS module, beginning with a KS, followed by an AT, the three optional tailoring domains, and finally, the ACP.

[0069] In some embodiments, synthesis of a PKS begins on the loading module with an AT loading an acyl-CoA derivative onto an ACP. In the next module (the first extension module), a KS then condenses the acyl-CoA derivative on the loading ACP with the acyl-CoA derivative on the next ACP down the chain, generating a ketide. The carbonyl in this ketide then undergoes various reductions, depending on the reductive tailoring domains present in the module. For example, a KR reduces the ketide to an alcohol. A KR and DH reduces the ketide to an alcohol and then reduces the alcohol to an alkene. A KR, DH, and ER produces a fully reduced hydrocarbon. The ketide produced by a PKS is dependent on the number of modules in the enzyme and the domain structure of these modules. Finally, a thioesterase (TE) hydrolyzes the ketide from the enzyme, preferably intramolecularly using an alcohol, generating a lactone or, with water, generating an organic acid. Exemplary PKS include but are not limited to Ac-Mal_{H}-Mal_{OH}, Ac-Mal_{OH}-Mal_{OH}, Ac-Mal_{H}-Mal_{OH}, and Ac-Mal_{OH}-Mal_{H}.

[0070] Based on the structures of the polyketide products, as well as biochemical features of the PKSs, PKSs are currently classified into types I, II, and III subgroups. Type I PKSs are megasynthases in which catalytic domains are typically found in a single polypeptide. A modular type I PKS, such as the 6-deoxyerythronolide B synthase (DEBS), consists of multiple modules and each module catalyzes one round of chain elongation and modification. Linear juxtaposition of modules facilitates unidirectional transfer of the growing polyketide from the upstream to the downstream modules in assembly line-like fashion. Type II PKSs are involved in the synthesis of aromatic polyketides, such as the aglycons of actinorhodin. Type III PKSs, such as chalcone synthase, are homodimeric PKSs that synthesize smaller aromatic compounds in bacteria, fungi, and plants. The linear arrangement of domains and modules provides a general guidance to reprogram these highly modular megasynthases.

[0071] Polyketides, synthesized by PKSs, are found in soil-borne or marine actinomycetes bacteria, filamentous fungi, and plants. Unfortunately, many of these organisms are difficult to work with in both laboratory and industrial settings. For example, the original strains are generally difficult to culture (long doubling times) or domesticate and they are genetically intractable and refractory toward common molecular biology tools. Moreover, the polyketide biosynthetic pathways are weakly expressed or silent under laboratory culturing conditions, resulting in low polyketide titers. Therefore, other microorganisms were investigated to be of use to introduce these complexes to in effort to create a system for generating a variety of target molecules using modified multiplex enzyme constructs.

[0072] Nonribosomal peptide synthases (NRPSs) are another class of enzyme that have similar modularity, hierarchical architecture, and logic to PKSs. The main difference lies in their synthesis, in that instead of acyl-CoA derivatives, NRPSs use adenylated amino acids as their substrates. Using amino acids dictates that NRPSs contain different catalytic domains within modules, and they have an adenylation domain (A) that adenylates and loads an amino acid onto a peptide carrier protein (PCP) and a condensation domain (C) that condenses amino acids from two PCPs. An exemplary NRPS is Ile-Ser-Ser.

[0073] There is also a class of modular megasynthases termed PKS-NRPS hybrids, as they contain modules of both PKS and NRPSs. Exemplary PKS-NRPS hybrids include but are not limited to Ac-Ser-Mal_{OH}, Ac-Ser-Mal_{H}, Ile-Mal_{OH}-Mal_{OH}, Ile-Mal_{OH}-Mal_{H}, Ile-Mal_{OH}-Mal_{OH}, Ile-Mal_{H}-Mal_{OH}, Ac-Mal_{OH}-Ser, Ac-Mal_{H}-Ser, Ile-Ser-Mal_{OH}, Ile-Ser-Mal_{H}, Ac-Ser-Ser, Ile-Mal_{OH}-Ser, Ile-Mal_{H}-Ser.

[0074] In some embodiments, microorganisms such as bacteria, a non-natural host can be used as a host for modified modular megasynthases. In accordance with these embodiments, Escherichia coli (E. coli) can be used for the reconstitution, manipulation, and optimization of domains/linkers of a megasynthase to construct such as system for producing a diverse variety or related and unrelated target molecules at a micro or macro scale. For example, Escherichia coli (E. coli) can be used for reconstitution, manipulation, and optimization of polyketide biosynthesis in part due to: (1) ease of culturing and fast growth characteristics; (2) availability of superior genetic tools; (3) well-understood primary metabolism; and (4) lack of endogenous polyketide pathways that may crosstalk or interfere with transplanted pathways.

[0075] In other embodiments, an organism of use to house modular complexes of the present disclosure can be a eukaryotic cell, bacteria, yeast, fungi, or other microorganism capable of being genomically-engineered or manipulated, for example, for improved synthesis or production of a natural or non-natural byproduct (e.g. secondary metabolites) of the organism.

[0076] It is understood by those of skill in the art that polyketide biosynthesis revealed that its corresponding genes are highly modular, producing megasynthases that perform much like an assembly line. Multiplex enzymes, such as, megasynthases can include, but are not limited to, polyketide synthases (PKSs) and non-ribosomal peptide synthases (NRPSs). The ability to reprogram these highly modular megasynthases has provided molecular biologists access to the biological activity and structural diversity of natural products. It has been demonstrated that small molecule diversity can be produced by manipulating PKS genes in three ways: 1) by adding or removing entire extension modules from the PKS, influencing the size of the small molecule (scaffold length); 2) by altering the reduction domains to completely reduce, partially reduce, or not reduce each acyl unit, influencing the functional groups present on the small molecule (scaffold structure); and 3) by altering the specificities of the acyl transferases that load each module, influencing the structure and functionality of the small molecule (scaffold specificity). However, due to the size and complexity, multiplex enzymes having various combinations of modules were extremely difficult to express in tested E. coli. Further, absence of sufficient techniques including in vivo mutagenesis to manipulate and alter these multiplex enzymes limited generation of a full-scale combinatorial library.

[0077] Methods described herein include computationally designing microbial biosynthetic machinery such as polyketide synthases (PKSs) and non-ribosomal peptide synthases (NRPSs) specifically for microorganisms and other hosts (e.g. E. coli) and then refactoring them in massive multiplex. A computational tool that searches publically available bacterial genomes for design rules specific to these genes is described herein. Design rules output by this program are then used to build synthetic genes that produce compounds of interest.

[0078] Other embodiments include methods for designing a non-naturally occurring PKS construct by shuffling or combining catalytic domains of PKS into a certain arrangement or combination of interest. The catalytic domains that can be used to create a non-naturally occurring PKS include, but are not limited to, Acyltransferase (AT), Acyl Carrier Protein (ACP), Keto-Synthase (KS), Ketoreductase (KR), Dehydratase (DH), Enoylreductase (ER), Methyltransferase (MT), Sulfhydrolase (SH), and/or Thioesterase (TE). In exemplary embodiments, two or more of these domains are linked together to create a non-naturally occurring PKS construct. In certain embodiments, the exemplary construct is capable of synthesizing a secondary metabolite in an organism. Some embodiments concern methods for creating an appropriate linker sequence that is capable of linking two or more of these catalytic domains. The linker sequence can be a polypeptide or a polynucleotide that is capable of maintaining the structure and function of a target protein or a target gene, respectively.

[0079] Some embodiments herein concern constructs for compiling an in vivo library of one or more target proteins. Certain embodiments can include a construct having a non-naturally occurring polypeptide or polynucleotide. Other embodiments can include a construct having the formula: (X—B)ₙ—Z, where X is at least one polypeptide encoding at least one domain of a first target protein; Z is at least one polypeptide encoding at least one domain of a second target protein; B is a polypeptide capable of linking X and/or Z; and n is 1 to 100. In accordance with these embodiments, the first or the second target protein can be the same or different target protein(s). In other embodiments, X and Z can be the same or different domain(s) of the first or the second target protein. In some embodiments, n can be 1, 2, 3, 4, 5, 6, 7, 8, 9, 10, 11, 12, 13, 14, 15, 16, 17, 18, 19, and/or 20 or more.

[0080] In other embodiments, an exemplary construct can include at least 70, 71, 72, 73, 74, 75, 76, 77, 78, 79, 80, 81, 82, 83, 84, 85, 86, 87, 88, 89, 90, 91, 92, 93, 94, 95, 96, 97, 98, and/or 99 percent identity to at least one of SEQ ID NOs: 33-64, 109, 111, 113, 115, 117, 119, 121, 123, 125, 127, 129, 131, 133, 135, 137, 139, 141, 143.

[0081] In other embodiments, an exemplary linker can include at least 70, 71, 72, 73, 74, 75, 76, 77, 78, 79, 80, 81, 82, 83, 84, 85, 86, 87, 88, 89, 90, 91, 92, 93, 94, 95, 96, 97, 98, and/or 99 percent identity to at least one of the polypeptide of SEQ ID NOs: 70-107.

[0082] In other embodiments, an exemplary polynucleotide encoding a linker can include at least 70, 71, 72, 73, 74, 75, 76, 77, 78, 79, 80, 81, 82, 83, 84, 85, 86, 87, 88, 89, 90, 91, 92, 93, 94, 95, 96, 97, 98, and/or 99 percent identity to at least one of the polynucleotide of SEQ ID NOs: 72, 75, 80, 82, 86, 91, 96, and 99.

[0083] In other embodiments, an exemplary KS-AT linker can include at least 70, 71, 72, 73, 74, 75, 76, 77, 78, 79, 80, 81, 82, 83, 84, 85, 86, 87, 88, 89, 90, 91, 92, 93, 94, 95, 96, 97, 98, and/or 99 percent identity to at least one of the Conserved Motif polypeptide of SEQ ID NOs: 103-107.

[0084] In other embodiments, the constructs disclosed herein can include a polypeptide construct that encodes catalytic domains of one or more target molecules such as polypeptides. In accordance with these embodiments, catalytic domains can include, but are not limited to, Acyltransferase (AT), Acyl Carrier Protein (ACP), Keto-Synthase (KS), Ketoreductase (KR), Dehydratase (DH), Enoylreductase (ER), Methyltransferase (MT), Sulfhydrolase (SH), and/or Thioesterase (TE). In certain exemplary embodiments, X and Z of the formula, (X—B)ₙ—Z, can include these named domains or other similar domains known in the art or to be discovered. In other embodiments, X and Z can be the same or different domain(s) of the first or the second target protein. For example, an exemplary construct can include a polypeptide having the formula, (X—B)ₙ—Z, where X includes Acyltransferase (AT), Z includes Acyl Carrier Protein (ACP), and B is a polypeptide capable of linking X and Z. Yet other embodiment, X can include, but is not limited to, Acyltransferase (AT), Acyl Carrier Protein (ACP), Keto-Synthase (KS), Ketoreductase (KR), Dehydratase (DH), Enoylreductase (ER), Methyltransferase (MT), Sulfhydrolase (SH), and/or Thioesterase (TE), and Z can include, but is not limited to, Acyltransferase (AT), Acyl Carrier Protein (ACP), Keto-Synthase (KS), Ketoreductase (KR), Dehydratase (DH), Enoylreductase (ER), Methyltransferase (MT), Sulfhydrolase (SH), and/or Thioesterase (TE). In other embodiments, X and Z can be the same or different domain(s) of the first or the second target protein.

[0085] In certain embodiments, constructs disclosed herein are capable of synthesizing a secondary metabolite or non-naturally occurring target molecule in a manipulated organism housing a modified system of modules disclosed herein. Exemplary secondary metabolites can include, but are not limited to, antibiotics or derivatives thereof, biologics, pharma agents and the like. In certain embodiments, secondary metabolites can include, but are not limited to, Rapamycin, Actinorhodin, Erythromycin A, 6-Methylsalicylic acid, Aflatoxin B1, Rifamycin S, Lovastatin, Amphotericin B, and Monensin A and other molecules. In certain embodiments, secondary metabolites include natural or non-natural products or molecules with fine chemical, pharmaceutical, flavor, or fragrance applications. In certain embodiments, secondary metabolites include target molecules of polyketides, non-ribosomal peptides, and/or polyketide-non ribosomal peptide hybrids.

[0086] Certain embodiments include a non-naturally occurring polynucleotide encoding the construct having the formula: (X—B)ₙ—Z, where X is at least one polypeptide encoding at least one domain of a first target protein; Z is at least one polypeptide encoding at least one domain of a second target protein; B is a polypeptide capable of linking X and/or Z; and n is 1 to 100. In some embodiments, n is 1, 2, 3, 4, 5, 6, 7, 8, 9, 10, 11, 12, 13, 14, 15, 16, 17, 18, 19, and/or 20. In accordance with these embodiments, the first or the second target protein can be the same or different target protein(s). In other embodiments, X and Z can be the same or different domain(s) of the first or the second target protein. In certain embodiments, the polynucleotides can include, but are not limited to, a traceable barcode positioned outside of the gene or the gene segment open reading frame, wherein the traceable barcode corresponds to or is quantitatively linked to a genetic variation of the gene or the gene segment.

[0087] In other embodiments, an exemplary polynucleotide can include at least 70, 71, 72, 73, 74, 75, 76, 77, 78, 79, 80, 81, 82, 83, 84, 85, 86, 87, 88, 89, 90, 91, 92, 93, 94, 95, 96, 97, 98, and/or 99 percent identity to at least one of SEQ ID NOs: 1-32, 108, 110, 112, 114, 116, 118, 120, 122, 124, 126, 128, 130, 132, 134, 136, 138, 140, 142.

[0088] Other embodiments herein concern methods for generating a construct having a non-naturally occurring polypeptide or polynucleotide. Certain embodiments include methods of: obtaining at least one polypeptide sequence encoding at least one domain of one or more target proteins; determining a linker sequence that are capable of linking the at one or more polypeptide encoding at least one domain of the one or more target protein; and generating a construct having the at least one polypeptide sequence and the linker sequence. In other embodiments, the step of determining a linker sequence further includes creating a gene cluster annotation of the target gene, and/or converting the construct having an amino acid sequence into at least one nucleotide sequence by using codon harmonization in order to determine one or more linkers of use to create modules (domains with a linker) of a modular megasynthase.

[0089] Directed evolution can be a powerful engineering and discovery tool, but random and often combinatorial nature of mutations makes their individual impacts difficult to quantify and thus challenges further engineering. More systematic analysis of contributions of individual residues (e.g., saturation mutagenesis) remains labor- and time-intensive for entire proteins and simply is not possible on reasonable timescales for multiple proteins in parallel (metabolic pathways, multi-protein complexes) using standard methods.

[0090] Advances in multiplex oligonucleotide synthesis, recombineering, and DNA assembly are radically changing genetic engineering with broad implications across biology and biotechnology in general. This technology can be used to rapidly and efficiently examine the roles of all genes in a microbial or eukaryotic genome using mixtures of barcoded oligonucleotides. See for example U.S. Patent Publication No. 2015/0368639, disclosure of which is incorporated by reference in its entirety to the extent they are not inconsistent with the explicit teachings of this specification.

[0091] Genetic manipulation (e.g., using whole genes or gene fragments disclosed herein) of genes encoding a protein can be used to make desired genetic changes (e.g. mutations, insertions, deletions etc.) that can result in desired phenotypes and can be accomplished through numerous techniques including but not limited to, i) introduction of new genetic material, ii) genetic insertion, disruption or removal of existing genetic material, as well as, iii) mutation of genetic material (e.g., point mutations or cluster point mutations) or any combinations of i), ii), and iii), that results in desired genetic manipulations with desired phenotypic changes. Mutations can be directed (e.g., site-directed) or random, utilizing any techniques such as insertions, disruptions or removals, in addition to those including, but not limited to, error prone or directed mutagenesis through PCR, mutation strains, and random mutagenesis.

[0092] In some embodiments herein, disclosed methods demonstrate abilities for inserting and accumulating higher order modifications into a microorganism's genome or a target protein. These mutations are not confined only to sequences of regulatory modules, but can also extend to protein-coding regions. Protein coding modifications can include, but are not limited to, amino acid changes, codon optimization, codon harmonization, and translation tuning.

[0093] In one embodiment, methods can include a barcoded-Tracking Combinatorial Engineering (bTRACE). Briefly, bTRACE uses a persistent barcode sequencing and multiplexed binary assembly to enable tracking of mutations and quantification of mutations on a population wide level. For example, each member of the library is barcoded, and using multiplex linking PCR, various characteristics of each gene (e.g., module types and specificities) can be assembled to the barcode. These assembled constructs are MiSeq compatible. Once qualitative characteristics of the library are connected to barcodes, more quantitative data can be collected by sequencing just the HiSeq compatible barcodes. See for example also Zeitoun et al., Quantitative Tracking of Combinatorially Engineered Populations with Multiplexed Binary Assemblies, ACS SYNTH BIOL. 2017 Jan. 24; and International Patent Publication No. WO 2015/123339, disclosures of which are incorporated by reference in its entirety to the extent they are not inconsistent with the explicit teachings of this specification.

[0094] Also described herein are methods for trackable, precision genome editing using a CRISPR-mediated system referred to as CRISPR enabled trackable genome engineering (CREATE). Clustered regularly interspersed short palindromic repeats (CRISPR) exist in many bacterial genomes and have been found to play an important role in adaptive bacteria immunity. The CREATE methods achieve high efficiency editing/mutating using a single vector that encodes both an editing cassette and a guide RNA (gRNA)). CREATE editing cassette introduces a silent protospacer adjacent motif (PAM). The PAM mutation can be any insertion, deletion or substitution of one or more nucleotides that mutates the sequence of the PAM such that the mutated PAM (PAM mutation) is not recognized by the CRISPR system. For example, a cell that includes a PAM mutation can be said to be “immune” to CRISPR-mediated killing (see for example FIG. 13B) in part, due to this lack of recognition.

[0095] Certain embodiments herein can apply to analysis and structure/function/stability library construction of any protein or small molecule or other target agent with a corresponding screen or selection for activity or selection for or identification of other distinguishable characteristic. In some embodiments, with respect to a target polypeptide, library size depends on the number (N) of amino acids in a protein of interest, with a full saturation library (e.g. all 20 amino acids or non-naturally-occurring amino acids at each position) scaling as for example, 19 (or more)×N and an alanine-mapping library scaling as 1×N. Therefore, screening of even very large proteins of more than 1,000 amino acids is tractable given current multiplex oligo synthesis capabilities (e.g. 120,000 oligos). In addition to activity screens, more general properties with developed high-throughput screens and selections could be efficiently tested using these libraries. For example, universal protein folding and solubility reporters have been engineered for expression in the cytoplasm, periplasm, and the inner membrane. Moreover, due to the designed single nature of mutations (e.g., no background mutations) screening of the same protein library under different conditions (e.g., different temperatures, different substrates or co-factors, etc.) permits identification of residue changes required for expression of various traits (design criteria). In other embodiments, because residues are analyzed one at a time, mutations at residues important for a particular trait (e.g., thermostability, resistant to environmental pressures, increased or decrease in functionality or production) can be combined via multiplex recombineering with mutations important for various other traits (e.g., catalytic activity) to create combinatorial libraries for multi-trait optimization.

[0096] In certain embodiments, methods for creating and/or evaluating comprehensive, in vivo, mutational libraries of one or more target protein(s) has been described. These embodiments can be extended via a barcode tracking technology to generate trackable mutational libraries for every residue or every module in a protein. Further, embodiments disclosed herein can be based on protein sequence-activity relationship mapping method extended to work in vivo, capable of working on a few to hundreds of proteins simultaneously depending on the technology selected. For example, these methods allow mapping in a single experiment all possible residue or module changes over a collection of desired proteins for a trait of interest, as part of individual proteins of interest or as part of a pathway. Constructs and methods disclosed herein can be used for, but are not limited to, mapping i) all residue changes for all proteins in a specific biochemical pathway (e.g., lycopene production) or that catalyze similar reactions (e.g., dehydrogenases or other enzymes of a pathway of use to produce a desired effect or produce a product) or ii) all residues in the regulatory sites of all proteins with a specific regulon (e.g., heat shock response) or iii) all residues of a biological agent used to treat a health condition (e.g. insulin, a growth factor (HCG), an anti-cancer biologic, a replacement protein for a deficient population, a replacement agent for a genetic modification or dysfunction, etc.).

[0097] Certain embodiments concern assigning scores related to various input parameters in order to generate one or more composite score(s) for designing genomically-engineered organisms or systems. These scores can reflect quality of genetic variations in genes or genetic loci as they relate to selection of an organism or design of an organism for a predetermined production, trait or traits. Certain organisms or systems can be designed based on need for improved organisms for biorefining, biomass (e.g., crops, trees, grasses, crop residues, and forest residues), biofuel production and using biological conversion, fermentation, chemical conversion and catalysis to generate and use compounds, biopharmaceutical production and biologic production. In certain embodiments, this can be accomplished by modulating growth or production of microorganism through genetic manipulations disclosed herein.

[0098] Certain embodiments concern the generation and use of one or more linker amino acid sequence(s). These linker sequences need to be capable of linking a selected catalytic unit to another selected catalytic unit and/or capable of linking one module (composed of two or more catalytic units) to another catalytic unit or module. These linker amino acid sequences can reflect particular characteristics necessary in the function of the linker protein, including the ability to permit the two connected catalytic units or modules to properly maintain their tertiary structure or protein folding to conserve their naturally-occurring function or purpose. As such, these linker sequences need to be long enough to maintain separation between the catalytic units or modules but not too long to be bulky and/or interfere with the proper folding or functioning of the catalytic units or modules. These linker sequences also need to be capable of putting the catalytic units or modules to perform their desired catalytic function(s). These desired catalytic functions may be normal to the catalytic unit or module or may be or mutated. In certain embodiments, the linkers can be context-independent, wherein the same linker amino acid sequence can be used as part of multiple different modules. In certain embodiments, these linkers contain conserved regions and variable regions. In some embodiments, the linker sequences have conservation with respect to their lengths. In some embodiments, subsections of the linker sequences have conserved regions, particularly within linker classes (e.g. KS-AT linkers, AT-DH linkers. In some embodiments, the linker sequences can contain non-naturally occurring amino acids. In some embodiments the linker sequences code for linker proteins having structural conservation, in some embodiments this is conserved secondary structure, and in some embodiments this is conserved tertiary structure, and in some embodiments this is conserved secondary and tertiary structure.

[0099] In certain embodiments, domain linker sequences can be about 10 to about 500 amino acids in length. In other embodiments, domain linker sequences can be about 10 to about 450 amino acids in length. In yet other embodiments, domain linker sequences can be categorized into a linker type. In certain embodiments, the linkers categorized as Ketosynthase-Acyltransferase (KS-AT) have a length of about 5 to about 250 amino acids; in some embodiments, linker length can be about 5 to about 50 amino acids (e.g. 9 amino acids); in in some embodiments linker length can be about 5 to about 15 amino acids (e.g. 12 amino acids); in in some embodiments, the linker length can be about 10 to about 40 amino acids (e.g. 31 amino acids); in in some embodiments the length can be about 35 to 50 amino acids (e.g. 43 or 46 amino acids); in some embodiments, linker length can be about 50 to about 150 amino acids in length (e.g. 96 amino acids; 100 amino acids).

[0100] In certain embodiments, linkers can be named and categorized by the catalytic domains of which they connect together in a construct, a modular megasynthase. In accordance with these embodiments, linkers can be categorized as Acyltransferase Domain-Dehydratase Domain (AT-DH) having a length of about 50 amino acids to about 110 amino acids. In yet other embodiments, a domain linker sequence can be about 40 to about 80 amino acids in length. For example, a domain linker can be about 60 to 70 amino acids in length. In certain embodiments, domain linkers categorized as Dehydratase Domain-Enoylreductase Domain (DH-ER) can be about 150 amino acids to about 750 amino acids in length. In other embodiments, domain linkers categorized as Dehydratase Domain-Enoylreductase Domain (DH-ER) can be about 250 to about 400 amino acids in length. In certain embodiments, domain linkers categorized as Dehydratase Domain-Enoylreductase Domain (DH-ER) can be about 5 to about 75 amino acids in length; or about 10; or about 20; or about 30 amino acids in length. In certain embodiments, domain linkers categorized as Ketoreducatse Domain-Acyl Carrier Protein (KR-ACP) can be about 25 to about 400 amino acids in length. In other embodiments, domain linkers categorized as Ketoreducatse Domain-Acyl Carrier Protein (KR-ACP) can be about 50 to about 150 amino acids in length.

[0101] In certain embodiments, a construct can be a modular megasynthase containing both linkers and catalytic domains. In some embodiments, a polynucleotide encoding a modular megasynthase can have a length of about 8,000 bp to about 15,000 bp. In some embodiments, a modular megasynthase can have a length of about 2,000 amino acids to about 5,000 amino acids. In some embodiments, a modular megasynthase can be Ac-Mal_{H}-Mal_{OH} having a length of about 3500 to 4500 amino acids (e.g. 4,312 amino acids, encoded by a polynucleotide having a length of about 12,939 bp). In some embodiments, a modular megasynthase can be Ac-Mal_{OH}-Malo_{H} having a length of about 3500 to 4500 amino acids (e.g. 3,761 amino acids, encoded by a polynucleotide having a length of about 11,286 bp). In some embodiments, a modular megasynthase can be Ac-Mal_{H}-Mal_{H} having a length of about 4000 to 5500 amino acids (e.g. 4,863 amino acids, encoded by a polynucleotide having a length of about 14,592 base pairs (bp.)). In some embodiments, a modular megasynthase can be Ac-Mal_{OH}-Mal_{H} having a length of about 4,312 amino acids, encoded by a polynucleotide having a length of about 10,029 bp.). In some embodiments, a modular megasynthase can be Ac-Ser-Malo_{H} having a length of about 3500 to 4500 amino acids (e.g. 3,342 amino acids, encoded by a polynucleotide having a length of about 10,029 bp.). In some embodiments, a modular megasynthase can be Ac-Ser-Mal_{H} having a length of about 3500 to 4500 amino acids (e.g. 3,893 amino acids, encoded by a polynucleotide having a length of about 11,682 bp.). In some embodiments, a modular megasynthase can be Ile-Mal_{OH}-Malo_{H} having a length of about 3500 to 4500 amino acids (e.g. 3,865 amino acids, encoded by a polynucleotide having a length of about 11,598 bp.). In some embodiments, a modular megasynthase can be Ile-Mal_{OH}-Mal_{H} having a length of about 4000 to 5000 amino acids (e.g. 4,416 amino acids, encoded by a polynucleotide having a length of about 13,251 bp.). In some embodiments, a modular megasynthase can be Ile-Mal_{H}-Mal_{H} having a length of about 4000 to 5500 amino acids (e.g. 4,968 amino acids, encoded by a polynucleotide having a length of about 14,904 bp.). In some embodiments, a modular megasynthase can be Ile-Mal_{H}-Malo_{H} having a length of about 4000 to 5000 amino acids (e.g. 4,416 amino acids, encoded by a polynucleotide having a length of about 13,251 bp.). In some embodiments, a modular megasynthase can be Ac-Mal_{OH}-Ser having a length of about 3000 to 4000 amino acids (e.g. 3,347 amino acids, encoded by a polynucleotide having a length of about 10,044 bp.). In some embodiments, a modular megasynthase can be Ac-Mal_{H}-Ser having a length of about 3500 to 4500 amino acids (e.g. 3,898 amino acids, encoded by a polynucleotide having a length of about 11,697 bp.). In some embodiments, a modular megasynthase can be Ile-Ser-Malo_{H} having a length of about 3000 to 4000 amino acids (e.g. 3,446 amino acids, encoded by a polynucleotide having a length of about 10,341 bp.). In some embodiments, a modular megasynthase can be Ile-Ser-Mal_{H} having a length of about 3500 to 4500 amino acids (e.g. 3,997 amino acids, encoded by a polynucleotide having a length of about 11,994 bp.). In some embodiments, a modular megasynthase can be Ac-Ser-Ser having a length of about 2500 to 3500 amino acids (e.g. 2,928 amino acids, encoded by a polynucleotide having a length of about 8,787 bp.). In some embodiments, a modular megasynthase can be Ile-Mal_{OH}-Ser having a length of about 3000 to 4000 amino acids (e.g. 3,451 amino acids, encoded by a polynucleotide having a length of about 10,356 bp.). In some embodiments, a modular megasynthase can be Ile-Mal_{H}-Ser having a length of about 3500 to 4500 amino acids (e.g. 4,002 amino acids, encoded by a polynucleotide having a length of about 12,009 bp.). In some embodiments, a modular megasynthase can be Ile-Ser-Ser having a length of about 2500 to 3500 amino acids (e.g. 3,032 amino acids, encoded by a polynucleotide having a length of about 9,099 bp.).

[0102] Nucleic Acids

[0103] A “nucleic acid” can include single-stranded and/or double-stranded molecules, as well as DNA, RNA, chemically modified nucleic acids and nucleic acid analogs. It is contemplated that a nucleic acid can be of 3, 4, 5, 6, 7, 8, 9, 10, 11, 12, 13, 14, 15, 16, 17, 18, 19, 20, 21, 22, 23, 24, 25, 26, 27, 28, 29, 30, 31, 32, 33, 34, 35, 36, 37, 38, 39, 40, 41, 42, 43, 44, 45, 46, 47, 48, 49, 50, 51, 52, 53, 54, 55, 56, 57, 58, 59, 60, 61, 62, 63, 64, 65, 66, 67, 68, 69, 70, 71, 72, 73, 74, 75, 76, 77, 78, 79, 80, 81, 82, 83, 84, 85, 86, 87, 88, 89, 90, 91, 92, 93, 94, 95, 96, 97, 98, 99, 100, about 110, about 120, about 130, about 140, about 150, about 160, about 170, about 180, about 190, about 200, about 210, about 220, about 230, about 240, about 250, about 275, about 300, about 325, about 350, about 375, about 400, about 425, about 450, about 475, about 500, about 525, about 550, about 575, about 600, about 625, about 650, about 675, about 700, about 725, about 750, about 775, about 800, about 825, about 850, about 875, about 900, about 925, about 950, about 975, about 1000, about 1100, about 1200, about 1300, about 1400, about 1500, about 1750, about 2000 or greater nucleotide residues in length, up to a full length protein encoding or regulatory genetic element.

### Construction of Nucleic Acids

[0104] Isolated nucleic acids can be made by any method known in the art, for example using standard recombinant methods, synthetic techniques, or combinations thereof. In some embodiments, the nucleic acids can be cloned, amplified, or otherwise constructed.

[0105] For example, a multi-cloning site comprising one or more endonuclease restriction sites can be added. A nucleic acid can be attached to a vector, adapter, or linker for cloning of a nucleic acid. Additional sequences can be added to such cloning and sequences to optimize their function, to aid in isolation of the nucleic acid, or to improve the introduction of the nucleic acid into a cell. Use of cloning vectors, expression vectors, adapters, and linkers is well known in the art.

### Recombinant Methods for Constructing Nucleic Acids

[0106] Isolated nucleic acids can be obtained from bacterial or other sources using any number of cloning methodologies known in the art. In some embodiments, oligonucleotide probes which selectively hybridize, under stringent conditions, to the nucleic acids of a bacterial organism. Methods for construction of nucleic acid libraries are known and any such known methods can be used.

### Nucleic Acid Amplification

[0107] Nucleic acids of interest can also be amplified using a variety of known amplification techniques. For instance, polymerase chain reaction (PCR) technology can be used to amplify target sequences directly from bacterial RNA or cDNA. PCR and other in vitro amplification methods can also be useful, for example, to clone nucleic acid sequences, to make nucleic acids to use as probes for detecting the presence of a target nucleic acid in samples, for nucleic acid sequencing, or for other purposes.

### Synthetic Methods for Constructing Nucleic Acids

[0108] Isolated nucleic acids can be prepared by direct chemical synthesis by methods such as the phosphotriester method, or using an automated synthesizer. Chemical synthesis generally produces a single stranded oligonucleotide. This can be converted into double stranded DNA by hybridization with a complementary sequence or by polymerization with a DNA polymerase using the single strand as a template. While chemical synthesis of DNA is best employed for sequences of about 100 bases or less, longer sequences can be obtained by the ligation of shorter sequences.

### Protein Methodologies

[0109] Any method known in the art for identifying, isolating, purifying, using and assaying activities of any target proteins are contemplated. Target proteins contemplated herein can include protein agents used to treat a human condition or to regulate processes (e.g., part of a pathway such as an enzyme) involved in disease of a human or non-human mammal. Any method known for selection and production of antibodies or antibody fragments is also contemplated.

### Computer Programs

[0110] Embodiments disclosed herein for generating a multienzyme complex of use for producing target agents can be provided as a computer program product which can include a machine-readable medium having stored thereon instructions which can be used to program a computer (or other electronic devices) to perform a process. The machine-readable medium can include, but is not limited to, floppy diskettes, optical disks, compact disc read-only memories (CD-ROMs), thumb drives, cloud storage and magneto-optical disks, ROMs, random access memories (RAMs), erasable programmable read-only memories (EPROMs), electrically erasable programmable read-only memories (EEPROMs), magnetic or optical cards, flash memory, or other type of media/machine-readable medium suitable for storing electronic instructions. Moreover, embodiments of the present disclosure can also be downloaded as a computer program product, wherein the program can be transferred from a remote computer to a requesting computer by way of data signals embodied in a carrier wave or other propagation medium via a communication link (e.g., a modem or network connection).

[0111] For the sake of illustration, various embodiments of the present invention have herein been described in the context of computer programs, physical components, and logical interactions within modem computer networks. While these embodiments describe various aspects in relation to modem computer networks and programs, methods and apparatus described herein are equally applicable to other systems, devices, and networks as one skilled in the art will appreciate. As such, the illustrated applications of the embodiments are not meant to be limiting, but instead exemplary. In addition, embodiments are applicable to all levels of computing from the personal computer to large network mainframes and servers.

[0112] The term “component” can refer broadly to a software, hardware, or firmware (or any combination thereof) component. Components are typically functional components that can generate useful data or other output using specified input(s). A component can or cannot be self-contained. An application program (also called an “application”) can include one or more components, or a component can include one or more application programs.

[0113] Some embodiments include some, all, or none of the components along with other modules or application components. Still yet, various embodiments can incorporate two or more of these components into a single module and/or associate a portion of the functionality of one or more of these components with a different component.

[0114] The term “memory” can be any device or mechanism used for storing information. In accordance with some embodiments of the present invention, memory is intended to encompass any type of, but is not limited to, volatile memory, nonvolatile memory and dynamic memory. For example, memory can be random access memory, memory storage devices, optical memory devices, magnetic media, floppy disks, magnetic tapes, hard drives, SIMMs, SDRAM, DIMMs, RDRAM, DDR RAM, SODIMMS, erasable programmable read-only memories (EPROMs), electrically erasable programmable read-only memories (EEPROMs), compact disks, DVDs, and/or the like. In accordance with some embodiments, memory can include one or more disk drives, flash drives, databases, local cache memories, processor cache memories, relational databases, flat databases, and/or the like. In addition, those of ordinary skill in the art will appreciate many additional devices and techniques for storing information can be used as memory.

[0115] Memory can be used to store instructions for running one or more applications or modules on processor. For example, memory could be used in some embodiments to house all or some of the instructions needed to execute the functionality of one or more of the modules and/or applications.

[0116] Exemplary Computer System Overview

[0117] Embodiments herein can include various steps. A variety of these steps can be performed by hardware components or can be embodied in machine-executable instructions, which can be used to cause a general-purpose or special-purpose processor programmed with the instructions to perform the steps. Alternatively, the steps can be performed by a combination of hardware, software, and/or firmware.

[0118] It is contemplated herein that components that make up a system for designing a modular multienzyme construct for production of target molecules (e.g. polypeptide, small molecules etc.) of embodiments disclosed herein can be provided as a kit. Further, organisms housing a modular multienzyme construct for production of target molecules (e.g. polypeptide, small molecules etc.) for expression or production of the target molecules can also be provided in kit form, for example, to fulfill a request or order.

[0119] The components described above are meant to exemplify some types of possibilities. In no way should the aforementioned examples limit the scope of the disclosure, as they are only exemplary embodiments.

[0120] Certain embodiments concern kits for producing modular megasynthases disclosed herein or kits for expressing or producing secondary metabolites of modular megasynthases.

[0121] Other embodiments concern kits having a host organism, one or more containers and one or more constructs disclosed herein for use in producing one or more secondary metabolite or one or more target molecule or agent.

### EXAMPLES

[0122] The following examples are included to illustrate various embodiments. It should be appreciated by those of skill in the art that the techniques disclosed in the examples that follow represent techniques discovered to function well in the practice of the claimed methods, compositions and apparatus. However, those of skill in the art should, in light of the present disclosure, appreciate that many changes can be made in the embodiments which are disclosed and still obtain a like or similar result without departing from the spirit and scope of the disclosure.

### Example 1

[0123] It is understood that megasynthases are valuable complexes for producing secondary metabolites. Previous studies demonstrate that wild-type genes of modular megasynthases were difficult to mutate or manipulate. In addition, wild-type genes were difficult to express due in part to their size and complexity. Further, due to this difficulty in expressing a wild-type megasynthase gene in a host, modulating or editing the expressed wild-type gene in the host created additional problems. For example, a wild-type gene of a megasynthase is extremely difficult to modulate or edit using in vivo editing tools. Therefore, other methods must be used to facilitate mutating and expressing these genes.

[0124] In certain methods, non-naturally occurring genes were created by (1) building functional scaffolds that can be cloned into the E. coli genome instead of high copy plasmids; (2) using codon harmonization instead of optimization to match the codon usage of E. coli; (3) using catalytic and tailoring domains from modular megasynthases that have already been proven to function in E. coli; and/or (4) linking the catalytic domains and modules. Generally, the sequences linking catalytic domains of megasynthases were considered junk DNAs as they were thought to be irrelevant to the overall function of the enzyme. However, this disclosure demonstrates that the linker sequences are essential for maintaining structure, and thus, function of catalytic domains of megasynthases.

[0125] To determine a linker sequence, a machine learning-based tool was used to build up a dataset to for developing certain designs. Medema et al., NUCL ACIDS RES (2011), released the ‘antibiotics and Secondary Metabolite Analysis SHell’ (antiSMASH). antiSMASH uses profile Hidden Markov Models (pHMMs) to discover secondary metabolite gene clusters in nucleotide sequence data. Here, antiSMASH 2.0 was used to collect every putative modular megasynthase gene (including PKS, NRPS, and PKS-NRPS hybrids) from the over 2,000 complete, annotated bacterial genomes on NCBI. Given the specific designs sought a database for appropriate linkers was probed.

[0126] In other methods, to uncover efficient methods for linking two target catalytic domains, amino acid sequences of every linker from the database of extension modules were deciphered, and categorized them per their catalytic domains linked. For example, in some exemplary methods, linkers were categorized as Ketosynthase-Acyltransferase (KS-AT). In other exemplary methods, linkers were classified as Acyl Carrier Protein-Ketosynthase (ACP-KS). Additional exemplary linker types identified using methods of this disclosure are detailed in Table 1.

TABLE 1
Exemplary Linker Types

| Linker | Catalytic Domains | | Size | Polypeptide |
|---|---|---|---|---|
| Category | Connected | Exemplary Sequence | (aa) | sequence |
| ACP | Acyl Carrier Protein- | AAIRSNVDPTGPTPLTPIQLWFFQ | 437 | SEQ ID NO: 70 |
| Condensation | Condensation Domain | QELPEPSLFTQSVLLEVPANTDA | | |
| | | ERLSTALLQLCECHAALRLRFHR | | |
| | | AKDGWQQFIPAATVPPDFETHTL | | |
| | | ATPSEMEQLTQAAEARIDIVHGP | | |
| | | LLAARLFTFSDGSPSRLFFTIHHL | | |
| | | AVDGVSWRILLEDLYRAYHQQP | | |
| | | LAPPATSFREWSLHLRDVAKSPS | | |
| | | LADEVSFWQQVPSCNLWPTQEK | | |
| | | NLVSEEASCSFELDEHATAALLR | | |
| | | QAPRTYNASIQELLVAALAQGV | | |
| | | ASTTGHSRVTLDVERHGRHASD | | |
| | | PQTDLSRTVGWFTTIYPVSVSVA | | |
| | | VSASIRDSVPSVREQLRRIPEEGF | | |
| | | HYPILRYLAAPNAFRDSQPSPILF | | |
| | | NYHGQIDTALQQTVEWKPASEI | | |
| | | VTPLRSLRARRSHLFEIISAVSNN | | |
| | | RLQVEWHYNSRLQERSAIEALAS | | |
| | | NFQQQLIALCHPPIHLQSSPAIV | | |
| ACP | Acyl Carrier Protein- | EEALNIDGLAVVHDPED | 17 | SEQ ID NO: 71 |
| Heterocyclization | Heterocyclization | | | |
| | Domain | | | |
| ACP-KS | Acyl Carrier Protein- | LGTDSKLPGGRRGTSDEP | 18 | SEQ ID NO: 73 |
| | Ketosynthase Domain | | | |
| ACP-KS | Acyl Carrier Protein- | GLPQEIKHTPAVRTTSEDP | 19 | SEQ ID NO: 74 |
| | Ketosynthase Domain | | | |
| ACP-TE | Acyl Carrier Protein- | VDTTAAETGGDTLSALFRSGLEA | 73 | SEQ ID NO: 76 |
| | Thioesterase Domain | GAVGEAYDLLRSVVRLRPRFRT | | |
| | | VDEVGDLAPAVTLRESDSELPRL | | |
| | | ICLST | | |
| ACP-TE | Acyl Carrier Protein- | TSGEDNPIPLCQGDGEE | 17 | SEQ ID NO: 77 |
| | Thioesterase Domain | | | |
| A-PCP | Adenylation Domain- | PVQVNNQTQLSAYCQTDKTLEI | 83 | SEQ ID NO: 78 |
| | Peptide Carrier Protein | AEIREFLAKFLPVYMIPSYFIFLK | | |
| | | QFPLTRHGKLDLHSLRELKETSK | | |
| | | SLVNSNYVAPRNHL | | |
| AT-ACP | Acyltransferase Domain- | KAAAPARAAKPAATPESLPFVLS | 109 | SEQ ID NO: 79 |
| | Acyl Carrier Protein | AFTVPALRAQADKLHLHMGMNI | | |
| | | QDRFLDVAYSLAFERTHFRKRL | | |
| | | VVFAKGKSDLLDALASYGRTGE | | |
| | | VPAGAVSMVDDRDRECRLAL | | |
| AT-DH | Acyltransferase Domain- | AKDETQTMQKGLAELHVLGAPV | 66 | SEQ ID NO: 81 |
| | Dehydratase Domain | DWRGFFAPYGGERVKLPTYAFQ | | |
| | | RERYWLEPMPTRAVGAGLNDAN | | |
| AT-DH | Acyltransferase Domain- | GMRREQPLPLGLRRLLTDLHNA | 69 | SEQ ID NO: 82 |
| | Dehydratase Domain | GAAVDFSVLCPQGRLVDAPLPA | | |
| | | WSHRFLFYDREGVDNRSPGGST | | |
| | | VAV | | |
| AT-KR | Acyltransferase Domain- | AHPQQRDRDAQQLAQALAGLW | 301 | SEQ ID NO: 84 |
| | Ketoreductase Domain | TAGVEIDWPATRGGARRRNVPL | | |
| | | PTYPFQRQRFWVEAGAPRPQDD | | |
| | | ASAAQPQGLYYLPAWVVQRSG | | |
| | | AVPPAAGPGPGDTVLLLGGAGL | | |
| | | PLAERLARRLAERGARVVKVAA | | |
| | | AEGFRDDGGGGFALRPEERADH | | |
| | | AALWRALGPTHAFHCWGLEED | | |
| | | WEQGYFSLLALVQGREDAGRDG | | |
| | | PLSLTIVIDRAEEVAGNEPLEPGR | | |
| | | ATVAALARVLGQEMPRIACRDV | | |
| | | LVPNAGSAAEAQLAEALAGEPA | | |
| | | RPVDEFCVAWRGAQRWVKTYE | | |
| | | PVPAPAACAQRLRQGS | | |
| AT-KR | Acyltransferase Domain- | ADHRQITEAVADAYVLGHLPDF | 342 | SEQ ID NO: 85 |
| | Ketoreductase Domain | AALRRPHARKLDLPTYPFERRQY | | |
| | | WFRDARERPEQPRDTGGPRTEA | | |
| | | VRLLEDGRIEELAALLGGASDDQ | | |
| | | HTLQVLTKLAAQHNQQRTTRSI | | |
| | | ADDRYEIRWDRSTSPLSGADVD | | |
| | | QAGSWIVVSDDADAVPPLVDLL | | |
| | | AARNEPHQVVGLPASDADEERL | | |
| | | AETLRAAATEDATLRIVHVAALE | | |
| | | AGATPSMRSLLRMQHRILGGTR | | |
| | | RVFRAAVAAELRGPIWIVTRGA | | |
| | | QRVADTDTVAPHQSCLWGFGRA | | |
| | | ASLELPHVWGGLADLSEGGDNA | | |
| | | ADEWSALVDRIAAPHGSAVRED | | |
| | | QLALRDRAVYTPRLARRSAPPSG | | |
| | | TPLHLRGD | | |
| Condensation A | Condensation Domain- | TTSFIEHLQHTKQTLIDAFRHQSY | 183 | SEQ ID NO: 87 |
| | Adenylation Domain | TLEDLLAALQLPRDFSRSPLISVS | | |
| | | FNMDPSLTLPEFKDLKVSLPPSPI | | |
| | | SYTPFDLGFNLIELNDNLIIYCNY | | |
| | | NTELFKKETIKQFLESFEILLRGII | | |
| | | DDANHLLYQLPLLTPVQQEKLL | | |
| | | RQLTGKTRKLPEKATIIDDFVAQ | | |
| | | VKLTPNAPALIAGKISL | | |
| DH-ER | Dehydratase Domain- | AAWHVDGDVWARVALPEAAAS | 336 | SEQ ID NO: 88 |
| | Enoylreductase Domain | SAIRYGLHPALLDSSMHSLLLTQ | | |
| | | RLKAQVGDDVFVPFEAERLSVW | | |
| | | KDGLAEVWVKVAEFELGEGEF | | |
| | | WASLDLYDTSGEHVGRLQRLHA | | |
| | | RRIDRAALRRLAAAGVDRFLFRT | | |
| | | EWQPVEAPEAVFGGTWGLLGG | | |
| | | ADAPWADEVRSRLMQAGAQVV | | |
| | | DIARLSEAEACDGVIQLWGGDG | | |
| | | QVVESSHRQAASALVQVQELAL | | |
| | | AGFAKPVIWLTRGAVGTSSDDP | | |
| | | VSDLGASPLWGLLRTARNEHPE | | |
| | | LALRIVDLGDTAADLDTLASALA | | |
| | | LADEPECALRGAKVLAPRLKKA | | |
| | | PANAGLVLPAEGNWRLEIATKG | | |
| | | RLDQPLS | | |
| DH-ER | Dehydratase Domain- | VAYVAEDATATMLAEVALPGSI | 357 | SEQ ID NO: 89 |
| | Enoylreductase Domain | RSQQGLYAIHPALLDACFQSVGA | | |
| | | HPDSQSVGSGLLVPLGVRRVRA | | |
| | | YAPVRTARYCYTRVTKVELAGV | | |
| | | EADIDVLDAHGTVLLAVCGLRIG | | |
| | | TGVSERDKHNRVLNERLLTIEW | | |
| | | HQRELPEMDPSGAGKWLLISDC | | |
| | | AASDVTATRLADAFREHSAACT | | |
| | | TMRWPLHDDQLAAADQLRDQV | | |
| | | GSDEFSGVVVLTGPNTGTPHQGS | | |
| | | ADRGAEYVRRLVGIARELSDLPG | | |
| | | AVPRMYVVTRGAQRVLADDCV | | |
| | | NLEQGGLRGLLRTIGAEHPHLRA | | |
| | | TQIDVDEQTGVEQLARQLLATSE | | |
| | | EDETAWRDNEWYVARLCPTPLR | | |
| | | PQERRTIVADHQQSGMRLQIRTP | | |
| DH-KR | Dehydratase Domain- | AAWRQGDVVYADVRLPVPDGA | 241 | SEQ ID NO: 90 |
| | Ketoreductase Domain | EGLHPALLDAALHPARLLDDRD | | |
| | | RTPRMPFLWAGVHRYDGGATQ | | |
| | | ARVRIMRAGGHSAEQIAVQLAG | | |
| | | PDGRALFEVEALTVRPVPRSVHQ | | |
| | | PTWVTVTPPATVPVEPGVLDLSG | | |
| | | PPAHSPEEVRDQVWEAAEKLRS | | |
| | | RLPGPRIVVVTRSAAVAGLIRVAI | | |
| | | TEYPGQVALVEWDGGAASDHV | | |
| | | LPAAIRAAATAPEIRIADGRIGSP | | |
| | | RLVRAAIAGPGTGGFGD | | |
| Dual | Dual | AAWHVDGDVWARVALPEAAAS | 186 | SEQ ID NO: 91 |
| Condensation A | Condensation/Epimeri- | SAIRYGLHPALLDSSMHSLLLTQ | | |
| | zation Domain- | RLKAQVGDDVFVPFEAERLSVK | | |
| | Adenylation Domain | DGLAEVWVKVAEFELGEGEFW | | |
| | | ASLDLYDTSGEHVGRLQRLHAR | | |
| | | RIDRAALRRLAAAGVDRFLFRTE | | |
| | | WQPVEAPEAVFGGTWGLLGGA | | |
| | | DAPWADEVRSRLMQAGAQVVD | | |
| | | IARLSEAEACDGVIQLWGGDGQ | | |
| | | VVESSHRQAASALVQVQELALA | | |
| | | GFAKPVIWLTRGAVGTSSDDPVS | | |
| | | DLGASPLWGLLRTARNEHPELA | | |
| | | LRIVDLGDTAADLDTLASALALA | | |
| | | DEPECALRGAKVLAPRLKKAPA | | |
| | | NAGLVLPAEGNWRLEIATKGRL | | |
| | | DQPLS | | |
| ER-KR | Enoylreductase Domain- | PTQRRGMVDPD | 11 | SEQ ID NO: 93 |
| | Ketoreductase Domain | | | |
| ER-KR | Enoylreductase Domain- | IPQTGKSLVTLPPEQAQVFRPD | 22 | SEQ ID NO: 94 |
| | Ketoreductase Domain | | | |
| Heterocyclization | Heterocyclization | PVAAFGERLATLHGRLWQDLDH | 183 | SEQ ID NO: 95 |
| A | Domain-Adenylation | RLCGGVEVLREIARRRGRAAAA | | |
| | Domain | LPVTFTSTVSGAPTPGAGLMPGA | | |
| | | RLRYGISQTPQVWIDCQMMAED | | |
| | | GGLLLHWDVRDGVLPDGVAAD | | |
| | | MFAAFTELVERLADGDAVDEAD | | |
| | | PVVLPRRQRELVAAANDTAEPR | | |
| | | VRGPLHAAFLDRARRDPGRVAV | | |
| | | IAAGCTL | | |
| Joint AC-PC | (Both Acyl and Peptide) | LGTDSKLPGGRRGTSDEP | 18 | SEQ ID NO: 96 |
| | Carrier Protein- | | | |
| | Condensation Domain | | | |
| KR-ACP | Ketoreducatse Domain- | QGMAARLSDADKTRFSRQGME | 109 | SEQ ID NO: 98 |
| | Acyl Carrier Protein | ALGPTEALDLFEAAVMSDAPMA | | |
| | | VAAALDLGRLQRTLEDNNGGSA | | |
| | | PALYRELFSRAAGGR | | |
| | | GAGGGAGGGAGLRKLLVETAV | | |
| | | EQREAAVL | | |
| KR-ACP | Ketoreducatse Domain- | IGRAIAFAEQTGDAIAPEEGAYA | 92 | SEQ ID NO: 99 |
| | Acyl Carrier Protein | FETLLRHNRAYSGYAPVIGSPWL | | |
| | | TAFAQHSPFAEKFQSLGQNRSGT | | |
| | | SKFLAELVDLPREEWPDRLRRLL | | |
| KS-AT | Ketosynthase Domain- | QEVRPAPGQGLSPAVSTLVVAG | 106 | SEQ ID NO: 101 |
| | Acyltransferase Domain | KTMQRVSATAGMLADWMEGPG | | |
| | | ADVALADVAHTLNHHRSRQPKF | | |
| | | GTVVARDRTQAIAGLRALAAGQ | | |
| | | HAPGVVNPAEGSPGPGTVF | | |
| KS-AT | Ketosynthase Domain- | KAAAPARAAKPAATPESLPFVLS | 109 | SEQ ID NO: 102 |
| | Acyltransferase Domain | AFTVPALRAQADKLHLHMGMNI | | |
| | | QDRFLDVAYSLATTRTHFRKRL | | |
| | | VVFAKGKSDLLDALASYGRTGE | | |
| | | VPAGAVSMVDDRDECRLAL | | |
| Conserved Motif | Conserved Motif | AEAGPEPERGPVPAVSTLVVFGK | 100 | SEQ ID NO: 103 |
| KS-AT | Ketosynthase Domain- | TAQRVAATASVLADWMEGPGA | | |
| | Acyltransferase Domain | EVALADVAHTLNHHRARQTRFG | | |
| | | TVVARDRAQAIAGLRALAAGQH | | |
| | | APGVVAPREGSP | | |
| Conserved Motif | Conserved Motif | LADVAHTLNHHRARHAKFATVC | 28 | SEQ ID NO: 104 |
| KS-AT | Ketosynthase Domain- | ARDRAQ | | |
| | Acyltransferase Domain | | | |
| Conserved Motif | Conserved Motif | PAVSTLVVSGKTPERIASTAGAL | 31 | SEQ ID NO: 105 |
| KS-AT | Ketosynthase Domain- | ADWLAGPG | | |
| | Acyltransferase Domain | | | |
| Conserved Motif | Conserved Motif | PGTVF | 5 | SEQ ID NO: 106 |
| KS-AT | Ketosynthase Domain- | | | |
| | Acyltransferase Domain | | | |
| Conserved Motif | Conserved Motif | AVAGLRALAAGQPAPGVVGPHD | 22 | SEQ ID NO: 107 |
| KS-AT | Ketosynthase Domain- | | | |
| | Acyltransferase Domain | | | |

[0127] Biological diversity analyses the linker databases found conserved patterns. Using KS-AT linkers as an example, the KS-AT linker database analyzed contained 2,614 individual genes. A histogram of the lengths of the KS-AT linkers yielded unimodal results with a mean length of 106, indicating a conserved pattern. In addition, a calculation of Simpson's measure of evenness (E_{D}) was 0.283, indicating that some of the linkers in the KS-AT database contained identical sequences. Further analysis found only 1,876 of the 2,614 linkers were unique, indicating that 738 linker sequences are identical to one or more other KS-AT linkers (across different bacterial species and enzyme contexts). To determine the frequency of these identical (e.g. overrepresented) linkers, a rank-abundance (Whittaker) plot was generated. If each species were equally represented, this plot would have yielded a flat result, with each species (1/2614) representing 0.038% of the database. In these results, the mean abundance was 0.065% with standard deviation of 0.11%. 23 species had abundances over 2 standard deviations above the mean, with the most abundant at 2.14%, or a 46× enrichment. This determined that each linker database was biased toward a small number of Operational Taxonomic Units (OTUs). (See for example, FIG. 1).

[0128] To identify one possible design for each linker class, sequences were clustered at a level of 50% similarity to identify all sequences in the given database with high similarity to the enriched OTU. Then, the largest cluster in a set was selected, and clustering tools, as known and used by those of skill in the art (Multiple Expectation Maximization for Motif Elicitation (MEME) and Motif Alignment and Search Tool (MAST)) were performed to score each sequence for representativeness of the cluster. The sequence with the highest score was selected. Functional genes including two or more catalytic domains and a linker amino acid sequence were generated by combining the domains and the linker in an appropriate order (see for example, FIG. 2).

[0129] To process the information generated in the pattern processing linker dataset and yield a linker design, clustering analysis was implemented in UCLUST. (Edgar, 2010) Clustering identified the ‘biased’ OTU all other linkers within the database with sequence homology to the OTU.

[0130] In another method and as detailed above, using KS-AT as an exemplary linker design, the complete 2,614 sequence database was divided into 961 clusters with a mean relative abundance of 0.1%. 17 clusters were over 2 standard deviations above the mean relative abundance. The largest cluster contained 117 sequences, or 5.45% of the entire database, an almost 55× enrichment. Using the largest 117-member cluster from the database a scoring methodology was used to design a single exemplary KS-AT linker. MEME analysis (a form of machine learning) expectation maximization can be used to identify the conserved sequence motifs within a set of sequences. Given a set of motifs (such as those generated by MEME) and a target sequence, MAST calculates the statistical significance of motif matches to the target sequence, and as such, was an ideal way to profile the conserved sequences within the cluster, and assign each sequence a score (i.e. statistical significance). Using this method, the cluster was analyzed for conserved motifs using MEME, and MAST was then used to score each member of the subset. MEME identified five conserved motifs. See Table 1 and SEQ ID NOs: 102-106. MAST scored each sequence, with the highest scoring sequence a single “common” sequence was selected based on its E-value of 1.110-11. The exemplary KS-AT linker amino acid sequence designed was: QEVRPAPGQGLSPAV STLVVAGKTMQRV SATAGMLADWMEGPGADVALADVAHT LNHHRSRQPKFGTVVARDRTQAIAGLRALAAGQHAPGVVNPAEGSPGPGTVF (SEQ ID NO: 101). This amino acid sequence was used as the final KS-AT linker design. The same approach was also applied to identify designs for all other linker classes. See Table 1.

[0131] In the past, proper folding of a target polypeptide has been a significant problem when expressing modular megasynthases to produce a target polypeptide in E. coli.

[0132] Further, codon optimization can be used to maximize heterologous protein expression; however, codon usage can have an important effect in RNA secondary structure, gene expression, and/or protein folding. Given the importance of codon usage in protein folding, codon harmonization is used to match sequences of non-native to that of native organisms. In addition, genes produced using the methods disclosed herein can include lac operators for IPTG-inducible expression.

[0133] In certain exemplary methods, to validate the designed functional domains and linker amino acid sequence, SWISS-MODEL was used to homology model the structure of each sequence. (See for example, Arnold, K., Bordoli, L., Kopp, J. & Schwede, T. (The SWISS-MODEL workspace is a web-based environment for protein structure homology modelling. Bioinformatics 22, 195-201, 2006). An exemplary model of the catalytic molecules and modules for use with a KS-AT linker is illustrated in FIG. 3. The KS-AT linker model sequence aligned to a control KS-AT linker that was crystallized as part of a crystal structure of the Acyltransferase isolated from Mycobacterium tuberculosis. This type of validation was performed for each linker design of appropriate size (>30 amino acids in length) (data not shown).

### Example 2

[0134] In other exemplary methods, an exemplary non-naturally occurring (“synthetic”) gene encoding a polyketide synthase (PKS) was created to produce a target small molecule, delta-hexalactone, which is a food and flavor ingredient. The computational tool assembled amino acid sequences of the target catalytic domains and linkers (see for example, FIG. 2). A selected amino acid sequence was codon harmonized and synthesized in fragments by GenScript. These fragments were assembled into a complete gene via yeast TAR cloning. This synthetic gene was then restriction digested out of its associated plasmid, and this linear piece was integrated into the E. coli genome. Expression was induced with IPTG, and then shotgun proteomics and metabolomics were performed.

[0135] The initial genome mining of NCBI identified 6,943 possible Type I PKS coding sequences. These coding sequences (CDSs) were filtered to eliminate duplicates, and 2,837 extension modules that follow the canonical PKS logic were collected in the database. Codon Adaptation Indices (CAI) were calculated for each PKS gene discovered to determine any patterns that might exist in codon usage. It appeared that the codon usage in PKS genes do not drastically differ from codon usage across the genome, generating a Median CAI of 0.697 (data not shown).

[0136] FIG. 4 represents a gene design and assembly. As a proof of concept, a target product (e.g., delta-hexalactone) from available synthetic standards was chosen. Given this target, a non-naturally occurring PKS was designed using catalytic domains shown in the literature to function in E. coli and interdomain linkers from FIG. 5A. The target gene shown in FIG. 4 has the following structure: AT-ACP-KS-AT-KR-ACP-KS-AT-DH-ER-KR-ACP-TE. Amino acid sequence was codon harmonized for E. coli, assembled via TAR-cloning in S. cerevisiae, and inserted into the genome of E. coli strain BL21(dE3). (SEQ ID NOS: 65 and 66).

[0137] FIG. 5B represents a computational mining and a linker design. Briefly, bacterial genomes for putative Type I PKS, NRPS, and hybrid gene clusters were mined. Inter-domain linker sequences from putative clusters were determined, and linkers based on flanking domains were classified. Each class of linkers was clustered, and a final linker design from the largest cluster was selected.

[0138] All the linker designs selected had structural similarities to linkers in known crystal structures of control molecules (see for example, FIGS. 6A-C). These linkers are highly similar in structure, with this design appearing to be slightly less rigid. The gene was completely sequenced and contained only two mutations, both of which were non-synonymous (data not shown).

[0139] In this example, the gene was codon harmonized and synthesized in fragments by GenScript (see for example, FIG. 7A). Yeast TAR cloning of these fragments went as expected (see for example, FIGS. 7B and 7C). The gene was then integrated into the E. coli genome (see for example, FIG. 7D). Evidence suggests (see e.g. Wang Y, Pfeifer BA. 6-deoxyerythronolide B production through chromosomal localization of the deoxyerythronolide B synthase genes in E. coli. Metab. Eng. 2008; 10: 33-38) that genome integration of modular megasynthases yields better results in E. coli, so the construct was integrated into the genome of BL21(dE3)STAR.

[0140] With the targeted gene incorporated into the genome of the microorganism, the genome was qualitatively tested for expression and production of the target metabolite via mass spectrometry-based proteomics and metabolomics, (data not shown) indicating that the target non-native protein was highly expressed but was not significantly higher than native proteins. This is a valuable assessment of this system because dramatically overexpressed heterologous multimodular proteins often require significant amounts of chaperones for folding which can result in chaperone titration and the concomitant loss of folding and function.

[0141] In other exemplary methods, functionality of this design was used to identify secondary metabolite of interest, Hexalactone™. For example, high cell-density fed-batch fermentations were performed and extracts of the target strain, a negative control, and the authentic standard were each analyzed via GC-MS. This demonstrated that the target gene produced the target metabolite. As illustrated in FIG. 8A, a Hexalactone™ standard had a retention time of 3.66 minutes. A negative control had no peak at 3.66 minutes, whereas there was a peak present in the extract of the engineered microorganism strain. The chromatograms from each sample are illustrated in FIGS. 8B-8C. The mass spectrum for the Hexalactone™ standard and the 3.66-minute retention time peak from this strain match. Further, a library search against the NIST MS database identified the compound at 3.66 minutes in this sample as Hexalactone™, confirming the function of this design.

### Example 3

[0142] In addition to the novel polyketide synthase (PKS) described above, the techniques described herein are applicable to other multiplex enzymes such as non-ribosomal peptide synthases (NRPSs), as well as PKS-NRPS hybrids. This example details three other novel modular megasynthases created by the instant methods: an NRPS, an NRPS-PKS hybrid with one PKS module and two NRPS modules and an NRPS-PKS hybrid two PKS modules and one NRPS module.

[0143] These three megasynthases are exemplified by building Ac-Mal_{OH}-Ser (using a serine-specific extension module), Ile-Mal_{OH}-Ser (using an isoleucine-specific loading module), and Ile-Ser-Ser. The structures of the molecules produced by these designs are illustrated in FIG. 9.

[0144] The design, cloning, genome integration, genome sequencing, and proteomics were performed as described in Example 2 for the 6-hexalactone-producing PKS. Results were similar to those for the 6-hexalactone-producing PKS. Each novel modular megasynthase was sequence-verified and was sufficiently expressed upon IPTG-induction, as was sfp.

[0145] As detailed in Example 2, each new strain was fermented; however, different feed mixtures were used based on required substrates for the various strain harboring the novel modular megasynthase. Unlike 8-hexalactone, the target molecules from the designs for Ac-Mal_{OH}-Ser, Ile-Mal_{OH}-Ser, and Ile-Ser-Ser presented a more difficult detection challenge due to the lack of existing authentic standards for measuring the production of the target molecules. In addition, due to increased polarity and hydrogen-bonding, it was assumed that the target molecules were unlikely to be GC compatible. As a result, an LC-MS^{N}-based metabolomics approach was performed, thereby allowing for both detection and structural validation in a single experiment.

### Example 4

[0146] In certain exemplary methods, the principles described in the foregoing examples can be applied to the synthesis of an enormous variety of modular proteins by combining known catalytic modules with known linkers to create novel modular megasynthases. As described in Example 1, a set of desired modules has been identified, along with linker sequences, using phylogenetic analysis (FIG. 1). MEME and MAST scores (data available upon request) can be generated for each to determine a single, ideal amino acid linker sequence (FIGS. 12A and B). The selected amino acid sequence can then be codon harmonized and synthesized in fragments by for example, GenScript®. These fragments can be assembled into a complete gene via yeast TAR cloning. This synthetic gene can be restriction digested out of its associated plasmid, and this linear piece can be integrated into the E. coli genome. Expression can be induced with IPTG, and shotgun proteomics and metabolomics performed.

[0147] In this exemplary method, using PKSs, NRPSs, and hybrids of the two, 18 different possibilities arose for the combination of modules. A complete set of modules is included in Table 2, below, and FIG. 9. These 18 different possibilities generate a design space of 18 different modular megasynthases and the corresponding metabolites across four classes: PKSs, NRPSs, and two different hybrid classes, hybrids with one PKS module and two NRPS modules as well as hybrids with two PKS modules and one NRPS module (FIG. 9).

TABLE 2

| | | | | Exemplary |
|---|---|---|---|---|
| Modular | | Length of exemplary | Length of exemplary | Polynucleotide and |
| Megasynthase | Name | polynucleotide | polypeptide | Polypeptide Sequence |
| PKS | Ac-Mal_{H}-Mal_{OH} | 12.939 | 4.312 | SEQ ID NO: 108 |
| | | | | SEQ ID NO: 109 |
| PKS | Ac-Mal_{OH}-Mal_{OH} | 11.286 | 3.761 | SEQ ID NO: 110 |
| | | | | SEQ ID NO: 111 |
| PKS | Ac-Mal_{H}-Mal_{H} | 14.592 | 4.863 | SEQ ID NO: 112 |
| | | | | SEQ ID NO: 113 |
| PKS | Ac-Mal_{OH}-Mal_{H} | 10.029 | 4.312 | SEQ ID NO: 114 |
| | | | | SEQ ID NO: 115 |
| PKS(2)-NRPS(1) | Ac-Ser-Mal_{OH} | 10.029 | 3.342 | SEQ ID NO: 116 |
| Hybrid | | | | SEQ ID NO: 117 |
| PKS(2)-NRPS(1) | Ac-Ser-Mal_{H} | 11.682 | 3.893 | SEQ ID NO: 118 |
| Hybrid | | | | SEQ ID NO: 119 |
| PKS(2)-NRPS(1) | Ile-Mal_{OH}-Mal_{OH} | 11.598 | 3.865 | SEQ ID NO: 120 |
| Hybrid | | | | SEQ ID NO: 121 |
| PKS(2)-NRPS(1) | Ile-Mal_{OH}-Mal_{H} | 13.251 | 4.416 | SEQ ID NO: 122 |
| Hybrid | | | | SEQ ID NO: 123 |
| PKS(2)-NRPS(1) | Ile-Mal_{H}-Mal_{H} | 14.904 | 4.968 | SEQ ID NO: 124 |
| Hybrid | | | | SEQ ID NO: 125 |
| PKS(2)-NRPS(1) | Ile-Mal_{H}-Mal_{OH} | 13.251 | 4.416 | SEQ ID NO: 126 |
| Hybrid | | | | SEQ ID NO: 127 |
| PKS(2)-NRPS(1) | Ac-Mal_{OH}-Ser | 10.044 | 3.347 | SEQ ID NO: 128 |
| Hybrid | | | | SEQ ID NO: 129 |
| PKS(2)-NRPS(1) | Ac-Mal_{H}-Ser | 11.697 | 3.898 | SEQ ID NO: 130 |
| Hybrid | | | | SEQ ID NO: 131 |
| PKS(1)-NRPS(2) | Ile-Ser-Mal_{OH} | 10.341 | 3.446 | SEQ ID NO: 132 |
| Hybrid | | | | SEQ ID NO: 133 |
| PKS(1)-NRPS(2) | Ile-Ser-Mal_{H} | 11.994 | 3.997 | SEQ ID NO: 134 |
| Hybrid | | | | SEQ ID NO: 135 |
| PKS(1)-NRPS(2) | Ac-Ser-Ser | 8.787 | 2.928 | SEQ ID NO: 136 |
| Hybrid | | | | SEQ ID NO: 137 |
| PKS(1)-NRPS(2) | Ile-Mal_{OH}-Ser | 10.356 | 3.451 | SEQ ID NO: 138 |
| Hybrid | | | | SEQ ID NO: 139 |
| PKS(1)-NRPS(2) | Ile-Mal_{H}-Ser | 12.009 | 4.002 | SEQ ID NO: 140 |
| Hybrid | | | | SEQ ID NO: 141 |
| NRPS | Ile-Ser-Ser | 9.099 | 3.032 | SEQ ID NO: 142 |
| | | | | SEQ ID NO: 143 |

[0148] In one exemplary model library, a target library of possible combinations can be generated, as illustrated in FIGS. 1 and 2, which represents a strategy for combinatorial assembly of barcoded polyketide synthases (PKSs), non-ribosomal peptide synthases (NRPSs), and/or PKS-NRPS hybrids. Loading modules include a PKS and NRPS (Malonyl-CoA and Ile specific). Extension modules can include a KSAT-KR-ACP, KS-AT-DH-ER-KR-ACP (both Malonyl-CoA specific), C-A-PCP, and Cy-A-PCP (both Ser specific). This exemplary target library can be used to produce at least the 45 small molecules illustrated in the example below.

[chemical structure]

[chemical structure]

[chemical structure]

[chemical structure]

### Example 5

[0149] As disclosed previously, a wild-type gene of a naturally-occurring megasynthase is difficult to modulate, mutate or edit using in vivo editing tools such as CREATE. However, once the synthetic megasynthase has been successfully expressed in E. coli, by methods disclosed herein, targeted and random modifications are possible, as illustrated in FIGS. 13A-C.

[0150] In one example, an extant Ac-Mal_{OH}-Ser construct described in Example 3 was synthesized and expressed in E. coli. In order to synthesize a different target molecule, one might envision needing to begin the entire process from the beginning. However, the serine-specific extension domain of the synthetic megasynthase was instead modified in vivo. Here, gene editing was used, using a CREATE plasmid inserted to replace the serine extension module with a glutamate extension module (FIG. 14A). With this change, the final synthetic product is not the 3-(hydroxymethyl)-7-methyl-1,4-oxazepane-2,5-dione synthesized by the Ac-Mal_{OH}-Ser megasynthase, but now is 3-(7-methyl-2,5-dioxo-1,4-oxazepan-3-yl)propanoic acid (FIG. 14B). In this method, using CREATE to edit the serine extension module in the Ac-Mal_{OH}-Ser synthetic megasynthase, at least 21 small molecules can be synthesized from the starting Ac-Mal_{OH}-Ser, as illustrated below:

[chemical structure]

[0151] Using this approach, via genome editing using CREATE enables rapid construction of a large library of targeted small molecules.

### Example 6

[0152] Exemplary methods described herein can be used to easily screen large libraries. FIG. 13A represents schematic diagrams illustrating CRISPR Enabled Trackable Genome Engineering (CREATE) cassette and design. CREATE vector contains both gRNA and an editing cassette in a size compatible with oligonucleotide chip synthesis. FIG. 13B represents Protospacer Adjacent Motif (PAM) mutation and editing. The CREATE editing cassette introduces a silent PAM mutation that protects from CRISPR cutting, coupled to the target mutation. FIG. 13C illustrates a CREATE strategy. CREATE cassettes are synthesized and cloned in a massively multiplexed fashion, allowing for massively multiplexed recombineering. A CREATE library can be designed to alter AT and A domain specificities, expanding the biosynthesis library from 32 to >10000 members. FIG. 15 illustrates barcoded-Tracking Combinatorial Engineering (bTRACE). Each member of the library is barcoded, and using multiplex linking PCR, various characteristics of each gene (i.e., module types and specificities) can be assembled to the barcode. These assembled constructs are MiSeq compatible. Once qualitative characteristics of the library are connected to barcodes, more quantitative data can be collected by sequencing just the HiSeq compatible barcodes.

[0153] Typical methods used to screen such libraries involve demultiplexing each library member, scaling up production, and then screening, making a large labor intensive and expensive undertaking. By applying the techniques herein described, barcoded PKSs, NRPSs, and hybrids of the two can be created (FIG. 10), leading in turn to the creation of libraries of small molecules (FIGS. 14A and 14B). Because these combinatorial libraries are trackable (FIG. 15), screening acts as the demultiplexing step because this process would demultiplex leading directly to target compounds.

[0154] Screening against two different classes of diseases is described as an example. The underlying screening can be the same in both classes. It includes at least three parts: 1) a disease that is genetic in nature, 2) the causative mutation is in a protein that has a close homolog in E. coli, and/or 3) when the mutation is introduced into E. coli, it proves to be toxic under specific conditions.

### Example 7

[0155] In another exemplary method, screening of a loss-of-function genetic condition can be evaluated. For example, one loss-of-function genetic condition known as galactosemia is described. Galactosemia is caused by a mutation in a protein known as galT, preventing subjects having this mutation from metabolizing galactose. For reference, galactose is a common carbohydrate that is produced by the body as a by-product during metabolism of lactose. Galactosemia is fatal in 75% of infants having this trait, with symptoms such as an enlarged liver, cirrhosis, renal failure, cataracts, vomiting, seizure, hypoglycemia, lethargy, brain damage, and ovarian failure. The occurrence of galactosemia is about 1:60,000, making it extremely rare. The galT gene in humans is highly homologous to the galT gene required for E. coli to metabolize galactose. The galT gene in E. coli can be replaced with a human homolog, and no phenotypic differences will be observed. In addition, the most common mutation causing galactosemia prevents E. coli from using galactose as its sole carbon source and the organism parish when only galactose is provided. The screen for a galactosemia drug could involve combining the instant biosynthetic library with the mutated galT, inducing production of small molecules to create a library, and then selecting for E. coli growth on galactose. If E. coli survives, a small molecule that rescues function of the mutated galT can be produced, analyzed, and obtained for further study.

[0156] In an additional exemplary method, screening against a gain-of-function mutation in Kch, a voltage gated potassium pump, can be carried out per the disclosure herein. A specific mutation in the potassium sensing domain of Kch renders the pump overactive and is implicated in both heart conditions and epilepsy. When introduced into E. coli the mutation eliminates E. coli's ability to grow in media containing potassium. The screen for a mutation in Kch to remedy this condition could involve combining a biosynthetic library, as detailed herein, with a mutated Kch, inducing production of small molecules to create a library, and then selecting for E. coli growth on media having potassium. Under such conditions, if E. coli survives, a small molecule that rescues function of the mutated Kch permitting growth on media having potassium was produced in the mutant E. coli, and can be analyzed and obtained for further study and potential use in subjects having this disorder.

[0157] The foregoing discussion of the invention has been presented for purposes of illustration and description. The foregoing is not intended to limit the invention to the form or forms disclosed herein. Although the description of the invention has included description of one or more embodiments and certain variations and modifications, other variations and modifications are within the scope of the invention, e.g., as can be within the skill and knowledge of those in the art, after understanding the present disclosure. It is intended to obtain rights which include alternative embodiments to the extent permitted, including alternate, interchangeable and/or equivalent structures, functions, ranges or steps to those claimed, whether or not such alternate, interchangeable and/or equivalent structures, functions, ranges or steps are disclosed herein, and without intending to publicly dedicate any patentable subject matter.

The application's sequence listing, which the Patent Office published only in electronic form, follows.

SEQUENCE LISTING (143 sequences)

SEQ ID NO: 1 - DNA, 12273 bp, Artificial Sequence
  ICC
atggttgccaaacatagtctggaaaacggtgtctttcacaagatgactgaaaacgagaaggaattgatccttcatttcaacaacactaagacagattaccctaagaacaagacgttgcatgaactttttgaagagcaggcaatgaaaaccccggatcacacagcactggtgttcggcgctcagagaatgacctacagggaactgaacgagaaggcgaatcaaacggcccgtctgttacgcgaaaaagggatcggacgtggcagcattgcggccattatcgcagatcgctcttttgaaatgatcatcggaatcatcggcatcctaaaggcaggcggtgcttatctgccgattgacccagaaaccccgaaagatcgtatcgcgttcatgctgagcgataccaaggcagctgtattgcttacgcagggaaaagcggccgatggcattgactgcgaagcggatatcgtgcaactggaccgtgaagccagcgatggtttttctaaagagccgctgagctctgttaatgatagtggcgacaccgcgtatattatctacacgagtggttccaccgggaccccgaaaggtgtgattaccccgcattattccgttatccgcgtggttcagaacactaactacatcgatatcacagaagacaacgtaatcctccaactatcaaactactcgttcgacggtagtgtgtttgatattttcggtgcgctcctaaacggggcctccctggtgatgatcgagaaagaagcactgttaaacattaatcgtctgggctcagctatcaatgaagagaaagtgagcgtgatgtttattaccacggcgctgttcaacatgattgccgatatccatgttgactgcctctcaaacctgcgtaaaattctgtttggcggcgaacgagcttcgatcccacatgtccgcaaggtactgaaccacgtcggtcgcgataaattaattcacgtatatggcccgactgaatcaacagtgtacgccacctattacttcataaacgaaattgatgacgaggcggaaactatccccataggtagcccgctggccaataccagcgtgctgattatggacgaagcaggcaaactggtcccaattggagtacctggcgaactgtgtatcgctggtgatgggttgtctaaaggttatcttaaccgtgaagagctcaccgcggaaaaatttatcccgcatccattcattcccggtgaacgtctgtacaagacgggcgaccttgccaaatggctcccagatggaaatatcgaatttataggccgcattgatcatcaggttaaaatccgtggctttcgaattgaactgggggagatcgaaagccgtttagaaatgcacgaggacatcaacgaaaccattgtgacggttcgcgaggatgaagagagccggccgtatatctgtgcatacattaccgctaatcgtgaaatttctcttgatgagctcaagggttttctgggggaaaaattacccgagtatatgatcccggcgtacttcgttaagctggataaactgccgttaacgaagaatggtaaagtcgaccggaaagccctgcctgaacccgatcgtactgcgggcgccgagaacgaatatgaggcaccgcgcaatgaaacagaagagaaactggcagctgtctggcaggacgtgttacatgttgaaaaagcaggcattcatgatcactttgctcaaatgggcggtcattcattgcacgcaatggaacttatcgctaagatcaaggaaaagatgaacgttgagatcccgctgcaccagttatttaagttggcgaccattaaagaactgtcggcgttcatcgaggccaatgtgccggttgagcagccatttgtgcatagccctgaagatcgctatcaaccgttcgcgctgaccgacgtacagcaagcctacctggtggggcgtcagccgggatttgccctgggcggtgttggctctcatttcttcgtcgaattcgagattgcagatttagacttgacccgcctggaaacggtttggaaccgtttaatagcacgccacgatatgttgcgtgctattgtacgtgacggtcagcaacaggtgctggaacagaccccgccatgggtgatcccggcgcatactctgcacacaccagaagaggcattacgagttagagaaaaactggctcatcaggtcttaaaccctgaagtctggcccgtatttgatctgcaagtgggctatgttgacggtatgccggcacgtctttggctctgcctagataatctattattggacgggctgagtatgcagattcttctcgccgaactggagcacggatatcgttaccctcaacagctactgcctcccctgccagttacctttcgtgattacttgcaacagccgagccttcagtctccgaacccagacagcctggcatggtggcaggctcaactggatgacatcccgccagcaccggctctcccactgcgttgtctgccacaggaagtggagactcctcgattcgcacggcttaatggcgctctcgattcaacacgttggcatcgtctgaaaaagcgcgcggccgacgcgcacctgactccgtcggccgtgttattgagtgtttggtccacagtcctgtcagcatggtcggctcagccggaatttactttaaacttgacacttttcgatcgtcgccctctgcatccccagattaatcaaatcttgggcgattttacctcacttatgcttctctcgtggcatccgggtgaatcctggctgcacagcgcgcagtctctgcaacagcgcttaagtcaaaacttgaatcaccgtgatgtttccgccattcgcgtcatgcggcagctggcgcaacagcaaaatgtcccggccgtacctatgcccgtggttttcacctctgcgctgggctttgaacaggataacttcctggcccggcgaaatctactgaaaccggtatggggtattagccagacgccgcaagtctggctggatcatcagatctatgaatctgagggcgaactgcgttttaactgggatttcgttgcagctctgtttccggcgggtcaggtggagcgtcagttcgaacaatactgcgcattattgaatcgcatggctgaggatgaaagcgggtggcagctcccgctggcggccctggtgcctcccgttaaacatgcgggtcagtgcgccgagcgcagcccgcgtgtttgtccagaacagtctcaaccgcacatcgcagctgatgaaagtactgtttccctgatatgtgacgcatttcgtgaggtcgtaggggaaagtgtgaccccggctgagaactttttcgaagcgggagccacgtccttaaatttggtacagctgcatgtgcttctccaacgtcacgaattttcaaccctgacgctactggatttattcacgcacccgtcgccagcggcccttgcggactatctcgcgggtgtcgccaccgtagaaaaaacgaagaggcctcggcccgtgagaaggcgtcagcgccggatcggagagccgttcccactcgctcctatgcaacacgccatgtgggtagggcggcacgaccaccaacagctcgggggagtagcaggccatctttacgtcgagtttgacggcgcgagagtcgaccccgatcggttgcgcgctgccgccacccgactcgccctacgtcaccctatgttgagggtacagttcctgcctgacggtacacaaaggatccctccagccgcaggctcgcgggactttcccatcagcgttgcggatcttcgtcacgtagctcctgacgttgtcgatcaacggctcgcgggtattagagacgcaaagtctcatcaacagcttgatggagctgtcttcgagttggctctcactctcctgccaggtgaaaggacgaggctgcacgtcgacctggatatgcaagctgctgacgccatgagctacaggatcctgctggcggacttggccgcactatacgacgggagagagcccccagcactcggttacacgtatagagagtaccgccaggctattgaggccgaggaaacattaccgcaacctgttcgcgacgccgatagggactggtgggcacaaagaataccacagcttccagacccgcccgcactaccgacgcgtgccggtggtgagagagatcgccggcgctcgaccagaagatggcactggttagacccacaaacaagggacgccctcttcgcacgagcacgagctcgtggcatcacacctgcaatgacacttgcggccgcgtttgcaaatgtcctcgcgagatggtccgcctcttcccggttcttactcaatttgccccttttctcgcgccaagcgttgcatccggacgtagacctcttggtaggtgacttcacatcgtcgctgctgttagatgttgacctaggagatacagtgtctaatcttgctcggaagaaccaactgacttttacggaggactgggaacaccggcattggagcggagtagagttgctgcgagaactcaaaaggcaacagcgttacccacacggagcgcccgtggtgttcacttctaatcttgggcgcagtttatattcttctcgggcggagtcccccttgggagagcctgaatggggaatttcgcaaacaccacaggtttggatcgaccatttagcatttgagcaccatggggaagtatggctccaatgggactcgaacgacgccctcttcccacctgctttagtcgagactctgtttgacgcgtactgtcaattgataaaccagctgtgcgacgatgaatccgcatggcaaaagcccttcgcggacatgatgccggcgagtcagcgtgctattcgtgagcgggtgaacgctaccggcgcaccgatcccggagggcctcttacacgaagggatttttcggatcgctcttcaacagcctcaggcgctcgcggtaacggacatgcggtaccaatggaatagttatcgagagatgcgggaacaggtcgtcgctttggcaaatctactccgagagcgcggggtcaagccaggggactcagtcgctgtagcgcttcctcggtcagtcttcctaaccttggctctccacgcgatcgtagaggcgggtgcggcgtggcttcccctcgacacgggctatccggacgatcggttgaagatgatgctagaggatgcacgaccctctctgttaatcacaaccgacgatcaactccccaggttctcagacgtccctaatcttaccagtctatgttacaacgcgcccctcactccacaaggcagcgctcctttacaacttagtcagccgcaccataccgcttatatcatttttacgtccggttccacgggcaggccgaagggtgtaatggtgggccaaactgcaatagtgaatagactattgtggatgcaaaaccactacccgcttaccggggaggacgtagtggctcaaaagactccctgctctttcgatgtcagcgtgtgggagttcttttggccttttatagccggcgctaaattggttatggcggagccggaagctcaccgagaccctttggccatgcaacagttctttgcagagtatggagtcacaacgacgcatttcgtcccatcgatgttagccgcgttcgtagcatcattgacgccacaaactgcgagacagtcatgtgccacacttaagcaagtcttctgctctggtgaggcccttcctgcggacctatgtcgggaatggcaacagcttactggagcccccttgcacaatctttacgggccgactgaggccgcagttgacgtatcgtggtatccagcgttcggggaggagctagcccaagtgcgagggtctagtgttccaattggatacccggtgtggaacacagggttaaggatcctcgacgccatgatgcatccggtaccaccaggtgtcgctggggatttgtacctgactggcattcaactggcacagggttatctagggcggcctgacttaacagctagccgattcatagcagatccattcgctcccggagagcggatgtaccgaacaggcgacgtggcacgctggttagataatggcgctgtcgagtatcttgggcggtcagacgatcagttaaagatacgtggacaacggattgagcttggtgaaatagaccgagttatgcaggcactaccagatgtcgagcaagccgtagcctcttgtgccattgcgcgagaagacattcccgggaacaagcacttggttgcgtacatagtgccgcaagaggagcagacctgcacagagcggtcacgttcaactctcacagtttccttcgtccgttctttcttaaaggagaaactaccagaatatatggtaccgtccgcgatcgtgatattagacgctctgccactcacgccaaatggaaagttggatagaagagctctgcctgctcctgacttgcactcgcaactcctggataaatacgttgctcccagaaacccaatagagactattatcgcggcagcattctcttcattgcttggatgcgacgtccaagatgcggacgcagatttctttgcgctcgggggccatagtctattggccatgaagctcgcagcgcaattgtcgagacaggtagcacggcaagtaacgcccgggcaagtcatggtcgcctcgacagtcgcgaaactcgcgaccattatcgacgctgagctgccagtagaacagccttttgtgcactcaccggaagagcggtatcgaccattcgcgttaacggatgttcagcaagcctacctggtcgggcgccagccgggatttgccctgggcggtgtaggctcgcatttcttcgtggaattcgagatcgcagatctcgacatacaccgcctggaaaaagtgtggaaccgtttaattgcacgtcatgatatgttgcgcgctgtggttcgtgacggtcagcaacgtgtactggaacagaccccgccatgggtcataccagcacatattcttcacagtcctgaagaggcattacaggttcgtgatcgtttagctcaccaagtgttgaaccccgaagtctggccggtatttgatctgcaggtgggcttcgttgacggtatgccggcccgtttatggttgtgccttgataacctgttattggacgggctgagcatgcagattcttctctctgaactggagcatggatatcgctacccacagcaactccctcccccgttgccgatcacttttcgcgattatcttcagcaaccggcactccgtaccccaaatcctgactcattggcttggtggcagacgcaactggatgacatcccacctgcgcccgccctcccgctacgttgtctgcctcaagatgttgaaaccccgcgtttcgcgcgtctgtacggcgcaatggattctgctcgttggcgtcgcctgaaacagcgtgcggccgacgcacatctgactccgtcagctgtcctactgagcgtatggtctacagtgctggcagcttggtcggcgcagccggattttactctcaacctgacattattcgaccggcgaccactgcaccctcagattaatcaaatccttggcgattttacctcactgatgttattgtcgtggcatccgggtgagagttggctgcagtccgcgcgtcttctccagcaacgcctttcagaatcgctcaaccaccgtgatgttagcgccattcgcgtcatgcggcagctggcgagaaggcaaaatgtcccggccgtacccatgccggtcgtatttacctctgcgctggggtttgaacaggataacttcctggcccgtcgcaatctactgaaaccggtgtggggtatcagtcagacgccgcaagtttggctggaccatcaggtctatgaatccgagggcgaactgcgttttaactgggatttcgttgcggccctgtttccggacggtcaagtggaacgtcagttcgcgcaatactgcgccttattgaatcgcatggcagaagatgacagctcttggcagttgccgcttgctgatctggtgcccccgttaaaagtgaccgagcggcgagcgagaaggctgcgtccagaacgcgcccagcctcgtattgcagctgataagagttccgttagtctgatctgtgacacttttcgtgaggtggttggggaacccgtggcaccggctgagaactttttcgaagcgggagccacatccctcaatctggttcagctgcatgtccttctccaacgtcacgaatttgcgaccttaacgctactggatttgttcacccatccaagccctgttgcattggctaactatcttgcgggtgtggccctggaagagaaaacgaagcgcgtgcggccggttcggcgaagacagcgtcgcattggagagccgttcccactcgctcctatgcaacacgccatgtgggtagggcggcacgaccaccaacagctcgggggagtagcaggccatctttacgtcgagtttgacggcgcgagagtcgaccccgatcggttgcgcgctgccgccacccgactcgccctacgtcaccctatgttgagggtacagttcctgcctgacggtacacaaaggatccctccagccgcaggctcgcgggactttcccatcagcgttgcggatcttcgtcacgtagctcctgacgttgtcgatcaacggctcgcgggtattagagacgcaaagtctcatcaacagcttgatggagctgtcttcgagttggctctcactctcctgccaggtgaaaggacgaggctgcacgtcgacctggatatgcaagctgctgacgccatgagctacaggatcctgctggcggacttggccgcactatacgacgggagagagcccccagcactcggttacacgtatagagagtaccgccaggctattgaggccgaggaaacattaccgcaacctgttcgcgacgccgatagggactggtgggcacaaagaataccacagcttccagacccgcccgcactaccgacgcgtgccggtggtgagagagatcgccggcgctcgaccagaagatggcactggttagacccacaaacaagggacgccctcttcgcacgagcacgagctcgtggcatcacacctgcaatgacacttgcggccgcgtttgcaaatgtcctcgcgagatggtccgcctcttcccggttcttactcaatttgccccttttctcgcgccaagcgttgcatccggacgtagacctcttggtaggtgacttcacatcgtcgctgctgttagatgttgacctaggagatacagtgtctaatcttgctcggaagaaccaactgacttttacggaggactgggaacaccggcattggagcggagtagagttgctgcgagaactcaaaaggcaacagcgttacccacacggagcgcccgtggtgttcacttctaatcttgggcgcagtttatattcttctcgggcggagtcccccttgggagagcctgaatggggaatttcgcaaacaccacaggtttggatcgaccatttagcatttgagcaccatggggaagtatggctccaatgggactcgaacgacgccctcttcccacctgctttagtcgagactctgtttgacgcgtactgtcaattgataaaccagctgtgcgacgatgaatccgcatggcaaaagcccttcgcggacatgatgccggcgagtcagcgtgctattcgtgagcgggtgaacgctaccggcgcaccgatcccggagggcctcttacacgaagggatttttcggatcgctcttcaacagcctcaggcgctcgcggtaacggacatgcggtaccaatggaatagttatcgagagatgcgggaacaggtcgtcgctttggcaaatctactccgagagcgcggggtcaagccaggggactcagtcgctgtagcgcttcctcggtcagtcttcctaaccttggctctccacgcgatcgtagaggcgggtgcggcgtggcttcccctcgacacgggctatccggacgatcggttgaagatgatgctagaggatgcacgaccctctctgttaatcacaaccgacgatcaactccccaggttctcagacgtccctaatcttaccagtctatgttacaacgcgcccctcactccacaaggcagcgctcctttacaacttagtcagccgcaccataccgcttatatcatttttacgtccggttccacgggcaggccgaagggtgtaatggtgggccaaactgcaatagtgaatagactattgtggatgcaaaaccactacccgcttaccggggaggacgtagtggctcaaaagactccctgctctttcgatgtcagcgtgtgggagttcttttggccttttatagccggcgctaaattggttatggcggagccggaagctcaccgagaccctttggccatgcaacagttctttgcagagtatggagtcacaacgacgcatttcgtcccatcgatgttagccgcgttcgtagcatcattgacgccacaaactgcgagacagtcatgtgccacacttaagcaagtcttctgctctggtgaggcccttcctgcggacctatgtcgggaatggcaacagcttactggagcccccttgcacaatctttacgggccgactgaggccgcagttgacgtatcgtggtatccagcgttcggggaggagctagcccaagtgcgagggtctagtgttccaattggatacccggtgtggaacacagggttaaggatcctcgacgccatgatgcatccggtaccaccaggtgtcgctggggatttgtacctgactggcattcaactggcacagggttatctagggcggcctgacttaacagctagccgattcatagcagatccattcgctcccggagagcggatgtaccgaacaggcgacgtggcacgctggttagataatggcgctgtcgagtatcttgggcggtcagacgatcagttaaagatacgtggacaacggattgagcttggtgaaatagaccgagttatgcaggcactaccagatgtcgagcaagccgtagcctcttgtgccattgcgcgagaagacattcccgggaacaagcacttggttgcgtacatagtgccgcaagaggagcagacctgcacagagcggtcacgttcaactctcacagtttccttcgtccgttctttcttaaaggagaaactaccagaatatatggtaccgtccgcgatcgtgatattagacgctctgccactcacgccaaatggaaagttggatagaagagctctgcctgctcctgacttgcactcgcaactcctggataaatacgttgctcccagaaacccaatagagactattatcgcggcagcattctcttcattgcttggatgcgacgtccaagatgcggacgcagatttctttgcgctcgggggccatagtctattggccatgaagctcgcagcgcaattgtcgagacaggtagcacggcaagtaacgcccgggcaagtcatggtcgcctcgacagtcgcgaaactcgcgaccattatcgacgctgagacatccggggaagataaccctatccccctatgtcaaggcgatggggaggagatgagcacatggctacgtcgttttggacccccagtcgaacatcgggccaggctagtgtgtttcccccacgcaggcgcagcggcggattcatacttagacctagcaagagcgttagcaccagagatcgatgttcatgctgttcaataccccggcaggcaagacagaagggacgaggagccattaggaaccgcaggtgaaattgcagatgaagtggcagcggtgctacgtgcgtcgggaggggatgggccttttgcacttttcggccacagtatgggcgccctcatcgcgtacgagacagcaaggcgattagagagggaaccgggagggggacccttacgtttattcgtgagcggacaaacagcgccacgtgtccatgaacgaagaactgatctgcccggtgacgatggactcgtggacgagcttaggcgacttggcacctccgaggcagcgctcgcagacgaagccctgctggctatgtctctcccggtgctcagggcggattatagggtgttaagatcctacgcttgggcggatggtcccccactacgcgccggtataactgccctctgcggtgatgcagacccactaactgcaacaggggatgcggaacgctggttacaacattccgtgattccgggtcggacacggacatttcccggtgggcatttttatttaggggaacaagtgaccgaggtggcaggggctgtccgtagagatttactgagagcagggttagcgggttga

SEQ ID NO: 2 - DNA, 13596 bp, Artificial Sequence
  ICH
atggttgccaaacatagtctggaaaacggtgtctttcacaagatgactgaaaacgagaaggaattgatccttcatttcaacaacactaagacagattaccctaagaacaagacgttgcatgaactttttgaagagcaggcaatgaaaaccccggatcacacagcactggtgttcggcgctcagagaatgacctacagggaactgaacgagaaggcgaatcaaacggcccgtctgttacgcgaaaaagggatcggacgtggcagcattgcggccattatcgcagatcgctcttttgaaatgatcatcggaatcatcggcatcctaaaggcaggcggtgcttatctgccgattgacccagaaaccccgaaagatcgtatcgcgttcatgctgagcgataccaaggcagctgtattgcttacgcagggaaaagcggccgatggcattgactgcgaagcggatatcgtgcaactggaccgtgaagccagcgatggtttttctaaagagccgctgagctctgttaatgatagtggcgacaccgcgtatattatctacacgagtggttccaccgggaccccgaaaggtgtgattaccccgcattattccgttatccgcgtggttcagaacactaactacatcgatatcacagaagacaacgtaatcctccaactatcaaactactcgttcgacggtagtgtgtttgatattttcggtgcgctcctaaacggggcctccctggtgatgatcgagaaagaagcactgttaaacattaatcgtctgggctcagctatcaatgaagagaaagtgagcgtgatgtttattaccacggcgctgttcaacatgattgccgatatccatgttgactgcctctcaaacctgcgtaaaattctgtttggcggcgaacgagcttcgatcccacatgtccgcaaggtactgaaccacgtcggtcgcgataaattaattcacgtatatggcccgactgaatcaacagtgtacgccacctattacttcataaacgaaattgatgacgaggcggaaactatccccataggtagcccgctggccaataccagcgtgctgattatggacgaagcaggcaaactggtcccaattggagtacctggcgaactgtgtatcgctggtgatgggttgtctaaaggttatcttaaccgtgaagagctcaccgcggaaaaatttatcccgcatccattcattcccggtgaacgtctgtacaagacgggcgaccttgccaaatggctcccagatggaaatatcgaatttataggccgcattgatcatcaggttaaaatccgtggctttcgaattgaactgggggagatcgaaagccgtttagaaatgcacgaggacatcaacgaaaccattgtgacggttcgcgaggatgaagagagccggccgtatatctgtgcatacattaccgctaatcgtgaaatttctcttgatgagctcaagggttttctgggggaaaaattacccgagtatatgatcccggcgtacttcgttaagctggataaactgccgttaacgaagaatggtaaagtcgaccggaaagccctgcctgaacccgatcgtactgcgggcgccgagaacgaatatgaggcaccgcgcaatgaaacagaagagaaactggcagctgtctggcaggacgtgttacatgttgaaaaagcaggcattcatgatcactttgctcaaatgggcggtcattcattgcacgcaatggaacttatcgctaagatcaaggaaaagatgaacgttgagatcccgctgcaccagttatttaagttggcgaccattaaagaactgtcggcgttcatcgaggccaatgtgccggttgagcagccatttgtgcatagccctgaagatcgctatcaaccgttcgcgctgaccgacgtacagcaagcctacctggtggggcgtcagccgggatttgccctgggcggtgttggctctcatttcttcgtcgaattcgagattgcagatttagacttgacccgcctggaaacggtttggaaccgtttaatagcacgccacgatatgttgcgtgctattgtacgtgacggtcagcaacaggtgctggaacagaccccgccatgggtgatcccggcgcatactctgcacacaccagaagaggcattacgagttagagaaaaactggctcatcaggtcttaaaccctgaagtctggcccgtatttgatctgcaagtgggctatgttgacggtatgccggcacgtctttggctctgcctagataatctattattggacgggctgagtatgcagattcttctcgccgaactggagcacggatatcgttaccctcaacagctactgcctcccctgccagttacctttcgtgattacttgcaacagccgagccttcagtctccgaacccagacagcctggcatggtggcaggctcaactggatgacatcccgccagcaccggctctcccactgcgttgtctgccacaggaagtggagactcctcgattcgcacggcttaatggcgctctcgattcaacacgttggcatcgtctgaaaaagcgcgcggccgacgcgcacctgactccgtcggccgtgttattgagtgtttggtccacagtcctgtcagcatggtcggctcagccggaatttactttaaacttgacacttttcgatcgtcgccctctgcatccccagattaatcaaatcttgggcgattttacctcacttatgcttctctcgtggcatccgggtgaatcctggctgcacagcgcgcagtctctgcaacagcgcttaagtcaaaacttgaatcaccgtgatgtttccgccattcgcgtcatgcggcagctggcgcaacagcaaaatgtcccggccgtacctatgcccgtggttttcacctctgcgctgggctttgaacaggataacttcctggcccggcgaaatctactgaaaccggtatggggtattagccagacgccgcaagtctggctggatcatcagatctatgaatctgagggcgaactgcgttttaactgggatttcgttgcagctctgtttccggcgggtcaggtggagcgtcagttcgaacaatactgcgcattattgaatcgcatggctgaggatgaaagcgggtggcagctcccgctggcggccctggtgcctcccgttaaacatgcgggtcagtgcgccgagcgcagcccgcgtgtttgtccagaacagtctcaaccgcacatcgcagctgatgaaagtactgtttccctgatatgtgacgcatttcgtgaggtcgtaggggaaagtgtgaccccggctgagaactttttcgaagcgggagccacgtccttaaatttggtacagctgcatgtgcttctccaacgtcacgaattttcaaccctgacgctactggatttattcacgcacccgtcgccagcggcccttgcggactatctcgcgggtgtcgccaccgtagaaaaaacgaagaggcctcggcccgtgagaaggcgtcagcgccggatcggagagccgttcccactcgctcctatgcaacacgccatgtgggtagggcggcacgaccaccaacagctcgggggagtagcaggccatctttacgtcgagtttgacggcgcgagagtcgaccccgatcggttgcgcgctgccgccacccgactcgccctacgtcaccctatgttgagggtacagttcctgcctgacggtacacaaaggatccctccagccgcaggctcgcgggactttcccatcagcgttgcggatcttcgtcacgtagctcctgacgttgtcgatcaacggctcgcgggtattagagacgcaaagtctcatcaacagcttgatggagctgtcttcgagttggctctcactctcctgccaggtgaaaggacgaggctgcacgtcgacctggatatgcaagctgctgacgccatgagctacaggatcctgctggcggacttggccgcactatacgacgggagagagcccccagcactcggttacacgtatagagagtaccgccaggctattgaggccgaggaaacattaccgcaacctgttcgcgacgccgatagggactggtgggcacaaagaataccacagcttccagacccgcccgcactaccgacgcgtgccggtggtgagagagatcgccggcgctcgaccagaagatggcactggttagacccacaaacaagggacgccctcttcgcacgagcacgagctcgtggcatcacacctgcaatgacacttgcggccgcgtttgcaaatgtcctcgcgagatggtccgcctcttcccggttcttactcaatttgccccttttctcgcgccaagcgttgcatccggacgtagacctcttggtaggtgacttcacatcgtcgctgctgttagatgttgacctaggagatacagtgtctaatcttgctcggaagaaccaactgacttttacggaggactgggaacaccggcattggagcggagtagagttgctgcgagaactcaaaaggcaacagcgttacccacacggagcgcccgtggtgttcacttctaatcttgggcgcagtttatattcttctcgggcggagtcccccttgggagagcctgaatggggaatttcgcaaacaccacaggtttggatcgaccatttagcatttgagcaccatggggaagtatggctccaatgggactcgaacgacgccctcttcccacctgctttagtcgagactctgtttgacgcgtactgtcaattgataaaccagctgtgcgacgatgaatccgcatggcaaaagcccttcgcggacatgatgccggcgagtcagcgtgctattcgtgagcgggtgaacgctaccggcgcaccgatcccggagggcctcttacacgaagggatttttcggatcgctcttcaacagcctcaggcgctcgcggtaacggacatgcggtaccaatggaatagttatcgagagatgcgggaacaggtcgtcgctttggcaaatctactccgagagcgcggggtcaagccaggggactcagtcgctgtagcgcttcctcggtcagtcttcctaaccttggctctccacgcgatcgtagaggcgggtgcggcgtggcttcccctcgacacgggctatccggacgatcggttgaagatgatgctagaggatgcacgaccctctctgttaatcacaaccgacgatcaactccccaggttctcagacgtccctaatcttaccagtctatgttacaacgcgcccctcactccacaaggcagcgctcctttacaacttagtcagccgcaccataccgcttatatcatttttacgtccggttccacgggcaggccgaagggtgtaatggtgggccaaactgcaatagtgaatagactattgtggatgcaaaaccactacccgcttaccggggaggacgtagtggctcaaaagactccctgctctttcgatgtcagcgtgtgggagttcttttggccttttatagccggcgctaaattggttatggcggagccggaagctcaccgagaccctttggccatgcaacagttctttgcagagtatggagtcacaacgacgcatttcgtcccatcgatgttagccgcgttcgtagcatcattgacgccacaaactgcgagacagtcatgtgccacacttaagcaagtcttctgctctggtgaggcccttcctgcggacctatgtcgggaatggcaacagcttactggagcccccttgcacaatctttacgggccgactgaggccgcagttgacgtatcgtggtatccagcgttcggggaggagctagcccaagtgcgagggtctagtgttccaattggatacccggtgtggaacacagggttaaggatcctcgacgccatgatgcatccggtaccaccaggtgtcgctggggatttgtacctgactggcattcaactggcacagggttatctagggcggcctgacttaacagctagccgattcatagcagatccattcgctcccggagagcggatgtaccgaacaggcgacgtggcacgctggttagataatggcgctgtcgagtatcttgggcggtcagacgatcagttaaagatacgtggacaacggattgagcttggtgaaatagaccgagttatgcaggcactaccagatgtcgagcaagccgtagcctcttgtgccattgcgcgagaagacattcccgggaacaagcacttggttgcgtacatagtgccgcaagaggagcagacctgcacagagcggtcacgttcaactctcacagtttccttcgtccgttctttcttaaaggagaaactaccagaatatatggtaccgtccgcgatcgtgatattagacgctctgccactcacgccaaatggaaagttggatagaagagctctgcctgctcctgacttgcactcgcaactcctggataaatacgttgctcccagaaacccaatagagactattatcgcggcagcattctcttcattgcttggatgcgacgtccaagatgcggacgcagatttctttgcgctcgggggccatagtctattggccatgaagctcgcagcgcaattgtcgagacaggtagcacggcaagtaacgcccgggcaagtcatggtcgcctcgacagtcgcgaaactcgcgaccattatcgacgctgagcctggaattggggcgctagttcccgctcccgtggtaatcgcagcaggccgtacggaggaaccaattgccatagtatccatggcttgccggttacccggtggtgtgaataccccacagagactatgggaattattacgtgaagggggagaaaccctcagtggcttccctaccgaccgagggtgggacctcgcgaggttgcatcacccagacccagacaaccccggtacgtcatacgttgataaagggggattcctggacgatgcggcagggtttgacgcagaatttttcggtgtgagccccagagaagcagcggctatggacccgcagcagagattactcctcgaaaccagctgggagttagtcgagaatgcagggattgatccacatagcctaagggggaccgccactggtgtcttcctcggcgttgccaagtttgggtatggcgaggatacggcagctgccgaagacgtcgaggggtactctgtcactggtgtagccccggcagtggcgtcgggcagaattagttacacgatggggttggaagggccgtctatttcggttgataccgcctgttcctccagtctggttgcactccaccttgcagtcgagtcgctccggaaaggagaaagcagtatggccgtggtcgggggagcggcggtgatggccacaccgggtgtgtttgtggatttttcccgacagagagccttggccgcggatgggcgttcaaaggcgttcggagcaggtgcagacgggtttggatttagcgaaggtgtgacactggttctcctagaaagattaagtgaagcccggcgtaacggccatgaggtgctggcagttgttagaggttccgcattaaaccaggacggggcttcgaacgggctgagcgccccctcgggcccggcacagagaagagtgatacgccaagcactcgaatcgtgtggcctagaaccaggtgacgttgacgcggtggaagcgcacgggacaggaactgcgttaggggacccgatagaagcaaacgccttgctggacacttatggtagagatcgtgatgcggatcgacccctctggttaggaagtgttaagtcaaatataggacacactcaggcagcggcgggagtaactgggctgctcaaagtagtcctagccttacgcaatggggaactacccgccaccctacatgtcgaggaaccgacaccgcatgtggattggtcgagcgggggagttgctctcttggcgggtaatcagccgtggcgaagaggtgaacgaacccgtagagccgccgtgtccgcattcgggatcagtggtacgaacgcgcacgtgattgtggaagaagctccacaagaggtgagaccagcgcccggtcaaggactctcgcccgcggtgtcaaccttggtagtggcgggtaaaactatgcagcgtgtttcggcaaccgccggtatgctcgcagattggatggaaggcccaggtgcagatgtggcgctggcggacgtggcgcacacgttaaatcatcaccgttcacggcaaccaaagttcggtacggtggtggccagggaccggacacaggcaatcgccggactaagagcgctggcggcgggtcagcacgccccaggggttgttaaccctgctgaaggaagtccaggtccagggacggtgttcgtgtttcctggccaggggtcccagcgtgcaggcatgggggaggagttggctgcggctttccccgtgtttgccagaatccaccagcaagtgtgggatttactcgatgttcctgatctcgacgttaacgaaacggggtacgcacaaccagcactcttcgcactccaagtggcgctgtttgggctcctcgaatcatggggagtacggccggatgccgtggtcgggcatagtgtaggggaattagcggcagggtacgtttccgggctttggagtcttgaggatgcttgcacgctcgtgtcggcgagagcccgtctaatgcaagccttaccggcaggtggtgttatggcggcagttccagtgtccgaagacgaagcacgggctgtgttgggggaaggagtcgaaatagctgcggtcaacggtccgtcgagcgtggttctaagcggtgatgaagcagcagtgctccaggccgcggaagggttaggcaagtggacgcgattaccgacctcgcatgcattccattctgctcgtatggaaccaatgctggaagagtttagagcagtggcggaaggtctaacatacaggactccccaggtggcaatggccgccggagaccaggttatgaccgctgaatactgggtgcgtcaggttagggatacagttcgttttggcgagcaagttgcctcgttcgaggatgctgtattcgtggaattgggagcagatcgctctcttgcacggctagtcgatggtatcgcgatgttgcacggggatcatgaggcacaggctggtatgcggagagaacaacccttgcccttaggtttacgaagattgctaaccgacctgcataacgctggtgctgccgtcgattttagtgttttgtgcccacaaggtcgtctggttgacgcaccgttaccagcctggtcacaccggtttctcttctatgaccgggaaggagtggacaatagatcaccagggggaagcacagtggcggtccacccgcttttactagccgcggtggatgtgccgggccacggtggagcggttttcacgggtagactctcgactgacgagcaaccgtggttagcggagcacgttgtcgggggaagaaccctagttcctggttctgttttagtcgatctagccttagcggcaggcgaagacgtagggctaccggtgttagaagaattagtattgcagaggccgctggtgcttgccggcgcgggagcactcctacggatgtcggtcggggcaccagacgagagcggtagaagaactatcgatgttcacgcagctgaagacgtcgccgatttagcagatgcccaatggtcccagcacgccaccgggactttagcccaaggggtagcggcggggcccagggacacagagcaatggcccccagaggatgccgtccggattccattagacgaccattatgatggtctcgcggaacagggttatgagtacggtccgtcgtttcaggcgctagtggcctacgtggcggaggatgcgactgcgacaatgttagcggaagtcgcgcttccgggcagcattagatcgcaacaaggtctatacgccatccatcccgcactgctggacgcttgttttcaatctgtcggagcccacccagacagtcaatccgtcgggtcaggtctactcgtacccctcggtgttcggagagttcgtgcgtacgcacccgtaaggaccgcccgttattgttacacccgcgtcacgaaagttgaactagctggggttgaggccgacatcgacgttctggatgctcacggcacagtgcttctagccgtgtgcggtcttcgtatcgggaccggagtgagcgagagggacaaacacaacagagttctcaatgagcgcctactcaccatcgaatggcatcagcgtgaactaccagaaatggacccctcgggtgccgggaagtggctcctaatctcggactgtgcagcatccgatgtcaccgctacacgactggctgatgccttccgggagcacagcgctgcgtgcactaccatgcggtggccacttcacgatgatcaactagcagccgccgaccaactccgggaccaggtgggttcagatgagttttctggcgtggtagtactaacagggccaaacacagggacccctcatcagggttccgcagaccgtggcgccgagtacgttaggcggttagttggaatcgctcgtgaacttagcgatcttcccggagcggttccccgtatgtatgtcgtcacaaggggagcgcagagagtccttgccgatgattgtgttaatttagaacagggagggctcagaggtctgctgaggaccatcggtgctgagcacccacatctccgcgccacccaaattgatgttgatgagcagacaggagtagagcagctggcgcgacaactcctagctacatcggaggaagacgagacagcctggagggacaacgaatggtacgttgcgaggttatgccccacacccctgaggccacaggaacgtaggacaatagtggcggaccatcaacagtctggtatgcggttacaaatacgtacgcccggtgcaatcgatagtgtggcctttgaacccgcacccgatgtagagcaacccttacgggcgggtgaagttcgggttgacgttagagcaaccggtgttaatttccgtgacgttctactcgctctcgggatgtatccccagaaagctgacatggggacagaagcagctggtgttgtaacagcagtgggacctgatgtcgatgcgtttgcgcctggtgatagagttctagggctattccaaggggcatttgctccaattgcggtgactgaccatcgtttactggcacgggtgccagacgggtggtcagatgccgatgcggcggcggtgccaatagcttacacgacagcacattatgcgctgcacgacctggcggggttgcgggcggggcaatctgtcctgatacacgcggcagcgggtggtgttggtatggccgctgttgcactggcacggagggccggcgcagaagttctggctaccgcaggacctgcaaaacacggtacgctacgggcattagggctagatgatgaacacatcgcttcgagtcgggagaccgggttcgcgcgtaagttccgagagcggactgggggacgaggagtggacgtcgttctaaacagcttgaccggcgaactattagacgagtccgcggatctcctcgcggaggacggagtcttcgtggaaatgggaaagactgatctgcgcgatgcaggggactttcgtgggcgctacgccccgtttgatctaggggaagcaggcgatgacaggctcggggaaattctacgtgaggtggtgggactgctcggtgcaggggaactcgaccgactccctgttagcgcgtgggaattggggataccccagacggggaagtcgttagtgacgctgccacccgaacaagcgcaagttttcagaccagacggcactgtattgatcaccgggggaacgggaacgttaggtcggctgctggcccgtcatctggttacagagcacggggtgcgtcacctgctgctagtgtcgaggagaggagcagatgcccctggatcggacgagctgagggccgaaatcgaggatctcggagcatcagcggaaattgcagcatgtgatacagccgatcgagacgctctcagcgcgttgctagatggactgccgaggccactgaccggagtagttcacgccgcgggagtcctcgctgacggtctggttacatccatcgacgagcccgcagtcgaacaagttctccgtgcaaaagttgatgcggcctggaacctgcacgagctaactgcgaacaccggtctcagctttttcgtgctgttctcgtcagccgcaagtgtgttagcggggccggggcagggagtatatgcggcagcgaacgaatctttaaacgctctggccgctctgcgtaggactaggggtttacccgcaaaagcattgggatggggattatgggcgatagggcgtgcaatagcatttgccgagcagaccggtgacgcaatcgccccggaggaaggcgcgtacgccttcgagacactactcagacataacagggcgtactcgggttacgctcccgtgatagggtcaccatggctgactgcgttcgcccaacattcgccctttgcggagaagttccagtccctggggcaaaatagatccgggacgtctaagtttctggcagaattagtcgatctgccaagagaagaatggccagatcggttacgtcgtctattagaactggtgaggtctcatgctgccgcagtttcggggtatggatcggcagaccaattaccagaaagaaaagcattcaaagacctcggattcgattcactggcagcagtcgaactaagaaatcgtctagggaccgcgacaggcgtccggctgcccagtactctggtgttcgaccacccaaccccacttgcggttgcggaacatctacgtgatcgtctaacatccggggaagataaccctatccccctatgtcaaggcgatggggaggagatgagcacatggctacgtcgttttggacccccagtcgaacatcgggccaggctagtgtgtttcccccacgcaggcgcagcggcggattcatacttagacctagcaagagcgttagcaccagagatcgatgttcatgctgttcaataccccggcaggcaagacagaagggacgaggagccattaggaaccgcaggtgaaattgcagatgaagtggcagcggtgctacgtgcgtcgggaggggatgggccttttgcacttttcggccacagtatgggcgccctcatcgcgtacgagacagcaaggcgattagagagggaaccgggagggggacccttacgtttattcgtgagcggacaaacagcgccacgtgtccatgaacgaagaactgatctgcccggtgacgatggactcgtggacgagcttaggcgacttggcacctccgaggcagcgctcgcagacgaagccctgctggctatgtctctcccggtgctcagggcggattatagggtgttaagatcctacgcttgggcggatggtcccccactacgcgccggtataactgccctctgcggtgatgcagacccactaactgcaacaggggatgcggaacgctggttacaacattccgtgattccgggtcggacacggacatttcccggtgggcatttttatttaggggaacaagtgaccgaggtggcaggggctgtccgtagagatttactgagagcagggttagcgggttga

SEQ ID NO: 3 - DNA, 11943 bp, Artificial Sequence
  ICO
atggttgccaaacatagtctggaaaacggtgtctttcacaagatgactgaaaacgagaaggaattgatccttcatttcaacaacactaagacagattaccctaagaacaagacgttgcatgaactttttgaagagcaggcaatgaaaaccccggatcacacagcactggtgttcggcgctcagagaatgacctacagggaactgaacgagaaggcgaatcaaacggcccgtctgttacgcgaaaaagggatcggacgtggcagcattgcggccattatcgcagatcgctcttttgaaatgatcatcggaatcatcggcatcctaaaggcaggcggtgcttatctgccgattgacccagaaaccccgaaagatcgtatcgcgttcatgctgagcgataccaaggcagctgtattgcttacgcagggaaaagcggccgatggcattgactgcgaagcggatatcgtgcaactggaccgtgaagccagcgatggtttttctaaagagccgctgagctctgttaatgatagtggcgacaccgcgtatattatctacacgagtggttccaccgggaccccgaaaggtgtgattaccccgcattattccgttatccgcgtggttcagaacactaactacatcgatatcacagaagacaacgtaatcctccaactatcaaactactcgttcgacggtagtgtgtttgatattttcggtgcgctcctaaacggggcctccctggtgatgatcgagaaagaagcactgttaaacattaatcgtctgggctcagctatcaatgaagagaaagtgagcgtgatgtttattaccacggcgctgttcaacatgattgccgatatccatgttgactgcctctcaaacctgcgtaaaattctgtttggcggcgaacgagcttcgatcccacatgtccgcaaggtactgaaccacgtcggtcgcgataaattaattcacgtatatggcccgactgaatcaacagtgtacgccacctattacttcataaacgaaattgatgacgaggcggaaactatccccataggtagcccgctggccaataccagcgtgctgattatggacgaagcaggcaaactggtcccaattggagtacctggcgaactgtgtatcgctggtgatgggttgtctaaaggttatcttaaccgtgaagagctcaccgcggaaaaatttatcccgcatccattcattcccggtgaacgtctgtacaagacgggcgaccttgccaaatggctcccagatggaaatatcgaatttataggccgcattgatcatcaggttaaaatccgtggctttcgaattgaactgggggagatcgaaagccgtttagaaatgcacgaggacatcaacgaaaccattgtgacggttcgcgaggatgaagagagccggccgtatatctgtgcatacattaccgctaatcgtgaaatttctcttgatgagctcaagggttttctgggggaaaaattacccgagtatatgatcccggcgtacttcgttaagctggataaactgccgttaacgaagaatggtaaagtcgaccggaaagccctgcctgaacccgatcgtactgcgggcgccgagaacgaatatgaggcaccgcgcaatgaaacagaagagaaactggcagctgtctggcaggacgtgttacatgttgaaaaagcaggcattcatgatcactttgctcaaatgggcggtcattcattgcacgcaatggaacttatcgctaagatcaaggaaaagatgaacgttgagatcccgctgcaccagttatttaagttggcgaccattaaagaactgtcggcgttcatcgaggccaatgtgccggttgagcagccatttgtgcatagccctgaagatcgctatcaaccgttcgcgctgaccgacgtacagcaagcctacctggtggggcgtcagccgggatttgccctgggcggtgttggctctcatttcttcgtcgaattcgagattgcagatttagacttgacccgcctggaaacggtttggaaccgtttaatagcacgccacgatatgttgcgtgctattgtacgtgacggtcagcaacaggtgctggaacagaccccgccatgggtgatcccggcgcatactctgcacacaccagaagaggcattacgagttagagaaaaactggctcatcaggtcttaaaccctgaagtctggcccgtatttgatctgcaagtgggctatgttgacggtatgccggcacgtctttggctctgcctagataatctattattggacgggctgagtatgcagattcttctcgccgaactggagcacggatatcgttaccctcaacagctactgcctcccctgccagttacctttcgtgattacttgcaacagccgagccttcagtctccgaacccagacagcctggcatggtggcaggctcaactggatgacatcccgccagcaccggctctcccactgcgttgtctgccacaggaagtggagactcctcgattcgcacggcttaatggcgctctcgattcaacacgttggcatcgtctgaaaaagcgcgcggccgacgcgcacctgactccgtcggccgtgttattgagtgtttggtccacagtcctgtcagcatggtcggctcagccggaatttactttaaacttgacacttttcgatcgtcgccctctgcatccccagattaatcaaatcttgggcgattttacctcacttatgcttctctcgtggcatccgggtgaatcctggctgcacagcgcgcagtctctgcaacagcgcttaagtcaaaacttgaatcaccgtgatgtttccgccattcgcgtcatgcggcagctggcgcaacagcaaaatgtcccggccgtacctatgcccgtggttttcacctctgcgctgggctttgaacaggataacttcctggcccggcgaaatctactgaaaccggtatggggtattagccagacgccgcaagtctggctggatcatcagatctatgaatctgagggcgaactgcgttttaactgggatttcgttgcagctctgtttccggcgggtcaggtggagcgtcagttcgaacaatactgcgcattattgaatcgcatggctgaggatgaaagcgggtggcagctcccgctggcggccctggtgcctcccgttaaacatgcgggtcagtgcgccgagcgcagcccgcgtgtttgtccagaacagtctcaaccgcacatcgcagctgatgaaagtactgtttccctgatatgtgacgcatttcgtgaggtcgtaggggaaagtgtgaccccggctgagaactttttcgaagcgggagccacgtccttaaatttggtacagctgcatgtgcttctccaacgtcacgaattttcaaccctgacgctactggatttattcacgcacccgtcgccagcggcccttgcggactatctcgcgggtgtcgccaccgtagaaaaaacgaagaggcctcggcccgtgagaaggcgtcagcgccggatcggagagccgttcccactcgctcctatgcaacacgccatgtgggtagggcggcacgaccaccaacagctcgggggagtagcaggccatctttacgtcgagtttgacggcgcgagagtcgaccccgatcggttgcgcgctgccgccacccgactcgccctacgtcaccctatgttgagggtacagttcctgcctgacggtacacaaaggatccctccagccgcaggctcgcgggactttcccatcagcgttgcggatcttcgtcacgtagctcctgacgttgtcgatcaacggctcgcgggtattagagacgcaaagtctcatcaacagcttgatggagctgtcttcgagttggctctcactctcctgccaggtgaaaggacgaggctgcacgtcgacctggatatgcaagctgctgacgccatgagctacaggatcctgctggcggacttggccgcactatacgacgggagagagcccccagcactcggttacacgtatagagagtaccgccaggctattgaggccgaggaaacattaccgcaacctgttcgcgacgccgatagggactggtgggcacaaagaataccacagcttccagacccgcccgcactaccgacgcgtgccggtggtgagagagatcgccggcgctcgaccagaagatggcactggttagacccacaaacaagggacgccctcttcgcacgagcacgagctcgtggcatcacacctgcaatgacacttgcggccgcgtttgcaaatgtcctcgcgagatggtccgcctcttcccggttcttactcaatttgccccttttctcgcgccaagcgttgcatccggacgtagacctcttggtaggtgacttcacatcgtcgctgctgttagatgttgacctaggagatacagtgtctaatcttgctcggaagaaccaactgacttttacggaggactgggaacaccggcattggagcggagtagagttgctgcgagaactcaaaaggcaacagcgttacccacacggagcgcccgtggtgttcacttctaatcttgggcgcagtttatattcttctcgggcggagtcccccttgggagagcctgaatggggaatttcgcaaacaccacaggtttggatcgaccatttagcatttgagcaccatggggaagtatggctccaatgggactcgaacgacgccctcttcccacctgctttagtcgagactctgtttgacgcgtactgtcaattgataaaccagctgtgcgacgatgaatccgcatggcaaaagcccttcgcggacatgatgccggcgagtcagcgtgctattcgtgagcgggtgaacgctaccggcgcaccgatcccggagggcctcttacacgaagggatttttcggatcgctcttcaacagcctcaggcgctcgcggtaacggacatgcggtaccaatggaatagttatcgagagatgcgggaacaggtcgtcgctttggcaaatctactccgagagcgcggggtcaagccaggggactcagtcgctgtagcgcttcctcggtcagtcttcctaaccttggctctccacgcgatcgtagaggcgggtgcggcgtggcttcccctcgacacgggctatccggacgatcggttgaagatgatgctagaggatgcacgaccctctctgttaatcacaaccgacgatcaactccccaggttctcagacgtccctaatcttaccagtctatgttacaacgcgcccctcactccacaaggcagcgctcctttacaacttagtcagccgcaccataccgcttatatcatttttacgtccggttccacgggcaggccgaagggtgtaatggtgggccaaactgcaatagtgaatagactattgtggatgcaaaaccactacccgcttaccggggaggacgtagtggctcaaaagactccctgctctttcgatgtcagcgtgtgggagttcttttggccttttatagccggcgctaaattggttatggcggagccggaagctcaccgagaccctttggccatgcaacagttctttgcagagtatggagtcacaacgacgcatttcgtcccatcgatgttagccgcgttcgtagcatcattgacgccacaaactgcgagacagtcatgtgccacacttaagcaagtcttctgctctggtgaggcccttcctgcggacctatgtcgggaatggcaacagcttactggagcccccttgcacaatctttacgggccgactgaggccgcagttgacgtatcgtggtatccagcgttcggggaggagctagcccaagtgcgagggtctagtgttccaattggatacccggtgtggaacacagggttaaggatcctcgacgccatgatgcatccggtaccaccaggtgtcgctggggatttgtacctgactggcattcaactggcacagggttatctagggcggcctgacttaacagctagccgattcatagcagatccattcgctcccggagagcggatgtaccgaacaggcgacgtggcacgctggttagataatggcgctgtcgagtatcttgggcggtcagacgatcagttaaagatacgtggacaacggattgagcttggtgaaatagaccgagttatgcaggcactaccagatgtcgagcaagccgtagcctcttgtgccattgcgcgagaagacattcccgggaacaagcacttggttgcgtacatagtgccgcaagaggagcagacctgcacagagcggtcacgttcaactctcacagtttccttcgtccgttctttcttaaaggagaaactaccagaatatatggtaccgtccgcgatcgtgatattagacgctctgccactcacgccaaatggaaagttggatagaagagctctgcctgctcctgacttgcactcgcaactcctggataaatacgttgctcccagaaacccaatagagactattatcgcggcagcattctcttcattgcttggatgcgacgtccaagatgcggacgcagatttctttgcgctcgggggccatagtctattggccatgaagctcgcagcgcaattgtcgagacaggtagcacggcaagtaacgcccgggcaagtcatggtcgcctcgacagtcgcgaaactcgcgaccattatcgacgctgagcctggaattggggcgctagttcccgctcccgtggtaatcgcagcaggccgtacggaggaaccaattgccatcgtttcgatggcatgtcgtttaccgggaggagtcaatacgccccaacggctctgggaattactacgggagggtggtgaaaccttgtccgggttcccaacggaccgtggctgggacctagcacggcttcaccaccctgatccggacaaccccggaacgagctacgttgataagggtggatttctcgacgacgcggcgggtttcgacgcagagtttttcggggtttcaccaagggaagctgccgctatggaccctcagcaacgattacttttagagacctcgtgggagctagttgaaaatgcgggcatagatccacatagcctgcgagggacagcgacaggggtgttcctaggagttgcgaagtttggttatggtgaggacacagcagcagcggaagatgttgaaggttattcagttaccggtgttgctcccgctgtggcatctggccgcatatcctacactatgggtttagaaggtccttccatctcggtcgataccgcatgctcaagctcgctagtcgcgcttcatctagccgtagagtccctccgaaagggtgagtcatctatggcggtggtgggtggtgcagccgttatggcgactcctggggtatttgttgatttttcacgccaacgggcgcttgccgcagacggccgttccaaagcgttcggggcaggtgcagatggttttggtttcagcgagggagtcacgctggttctactagagcgtttaagtgaggcgcgtcgtaacggtcatgaagttctagctgtagtgcgcgggtccgcgttaaaccaggacggagcgagcaacggactttcagcaccctccggccctgcgcaacgtagagtaataaggcaagcgctcgaatcgtgtgggcttgaaccgggggatgttgacgcggttgaggcgcatggtactggtacagcactaggtgacccaatagaggccaatgcgctgttggacacttacgggcgagaccgtgatgcggatcgtccactttggttggggtccgttaagagcaatattgggcacactcaagctgcggccggggttacaggactgctgaaggttgtgttagcactgcgcaatggtgagctacctgcaacgttacatgtcgaggaaccaactccacacgtcgattggtcctcaggtggtgtcgcattactggcgggtaatcaaccatggcgaaggggagaaaggaccagaagggcggcagtgagcgcctttggtatctccggtacaaatgctcacgtgatagtggaagaggcgcctcaggaagttcgacccgcccctggccaagggctgtcgccagccgtgtccacgttagttgttgcaggtaaaaccatgcagcgtgtaagtgcgacagctggaatgcttgcagactggatggagggtcctggggccgatgttgcattggcggatgtggcccataccctgaaccatcaccgatcaagacagcccaagttcgggacggttgtagcgcgtgacaggactcaggcgatagctgggctccgtgcattggcggctggtcaacatgctcctggggtcgtcaacccagctgaaggttccccaggaccaggcaccgtgttcgtttttcccggtcaaggttcgcagagggcagggatgggggaggaactcgcggcagcctttcctgtcttcgctcgaatacatcagcaagtttgggacctcctagatgttcccgacctcgacgttaatgaaaccgggtacgcccaaccagcgctgttcgcgcttcaggtcgcgctctttggccttctggagtcgtggggtgttaggccagatgcagtggtagggcactcagttggtgagctggccgcggggtacgtgtccggtctttggtcactagaggacgcctgcacactagtctcagcaagagcgcgcctaatgcaggcactgcctgctggaggggtgatggcggcagtccccgtctccgaggatgaggcgcgggccgtcctgggcgagggagttgaaattgcggctgtgaatggaccctcgtccgttgtgctctcaggggacgaggcggcagtcttacaggccgccgaaggtctaggtaagtggacgcgactgccgaccagccatgcttttcactcagcgagaatggaacccatgctagaagagtttcgggccgtagcagagggtctgacctatcgtacccctcaagtagctatggctgctggggatcaggtgatgacagcagaatattgggtgcggcaggttcgggacacagttcgcttcggggagcaagtagcgtcattcgaggatgcggtgtttgttgagttaggcgctgacagaagtctagcgcgtttggtggacggcatcgccatgctgcacggtgaccacgaagcgcaggccgcggaccataggcaaatcaccgaagcggttgcggatgcttacgtcttaggccaccttccggattttgcggcgctgcggcggcctcacgcacgaaagttggacttaccaacttatcccttcgagcgtagacagtactggttcagagatgcgcgtgagaggccggaacaacccagagataccggcggacctcgcacagaagcagtccgtctgttagaggatggtaggattgaagaattagctgcacttttgggaggggccagtgatgaccaacacacattacaggtgctgactaagttggcggcgcaacataaccaacaacgaacaacccggtcaatcgctgacgacaggtacgaaataaggtgggaccgatcgacttccccactatccggagcagatgttgaccaagcggggagctggatcgtggtgtcagatgacgcagatgccgttcccccgctagtggacttgctggctgcacgtaacgagccccatcaggttgttggtctacccgcttcggacgcagacgaggagaggctcgcagagactctgcgtgcggctgcgactgaagatgctacccttcggatagtccacgttgcggcgctcgaagcaggcgctacccccagcatgcgttcactgctccgcatgcagcaccgaatactaggtggcacgcggcgggtgttcagggcagcggtcgcagcggagttaagaggtcccatttggatagtgacgcggggagcacaaagagtggctgacaccgatacagttgccccgcatcagtcatgcctctggggatttgggagggcagcatcgctggagctgccgcacgtttggggtggcctagcagatttatcagagggcggtgacaatgcggccgatgagtggagtgcgctagtggaccgcattgccgcaccccacggttcagcagttagggaggaccaactggcgctgagagacagggccgtatatacgccaagactggccagacgttctgcgcccccgagcgggactcccctacatctacgaggggatggcacagtgttaataacaggtgggactggtacactaggtaggctattagcgcgtcacctagtaacagagcatggggtgcggcatctcttactagtttcaaggagaggcgccgatgcccctggctcggatgaactgcgcgcagaaatagaggacttaggtgccagcgcggagatcgcagcgtgtgatacagcggatcgcgatgccctatctgccctactagatggtctcccccggccccttacgggtgtcgttcacgccgctggcgtgttagccgatggacttgtcactagcattgacgagcctgcggtggaacaggttctccgagcaaaggtggacgcggcatggaacctacacgaactcacagctaataccgggctatcctttttcgttcttttctcatcagcagcatcggtcctggcaggtccagggcaaggagtttatgcggctgcaaatgaatcgctcaacgcactagctgcgttaaggcgaactaggggtctgccggccaaggctctgggatggggcctgtgggccatcgggcgggcaatcgcttttgcggagcagaccggggacgccatcgctccagaggaaggagcatacgcttttgaaactctgttaaggcataaccgtgcctactcgggatatgcgcccgtcattggatctccctggttgaccgcgttcgcacagcattccccctttgcagaaaaattccaatcactcggacagaatcggtcagggacatcgaaattcttagcggagctagttgacctgcctcgtgaggaatggccggataggctcaggagactactagagttagttaggtcccatgccgccgcggtctccggttacggtagtgcagatcaactgccggaaagaaaagcgttcaaggatttggggtttgattcgctggccgccgttgaactgcgtaaccggctgggaacggctacaggggtacgactgccgtcaaccctagtatttgatcacccaactccgctggccgtcgctgagcacttaagagataggctaacatccggggaagataaccctatccccctatgtcaaggcgatggggaggagatgagcacatggctacgtcgttttggacccccagtcgaacatcgggccaggctagtgtgtttcccccacgcaggcgcagcggcggattcatacttagacctagcaagagcgttagcaccagagatcgatgttcatgctgttcaataccccggcaggcaagacagaagggacgaggagccattaggaaccgcaggtgaaattgcagatgaagtggcagcggtgctacgtgcgtcgggaggggatgggccttttgcacttttcggccacagtatgggcgccctcatcgcgtacgagacagcaaggcgattagagagggaaccgggagggggacccttacgtttattcgtgagcggacaaacagcgccacgtgtccatgaacgaagaactgatctgcccggtgacgatggactcgtggacgagcttaggcgacttggcacctccgaggcagcgctcgcagacgaagccctgctggctatgtctctcccggtgctcagggcggattatagggtgttaagatcctacgcttgggcggatggtcccccactacgcgccggtataactgccctctgcggtgatgcagacccactaactgcaacaggggatgcggaacgctggttacaacattccgtgattccgggtcggacacggacatttcccggtgggcatttttatttaggggaacaagtgaccgaggtggcaggggctgtccgtagagatttactgagagcagggttagcgggttga

SEQ ID NO: 4 - DNA, 12282 bp, Artificial Sequence
  ICS
atggttgccaaacatagtctggaaaacggtgtctttcacaagatgactgaaaacgagaaggaattgatccttcatttcaacaacactaagacagattaccctaagaacaagacgttgcatgaactttttgaagagcaggcaatgaaaaccccggatcacacagcactggtgttcggcgctcagagaatgacctacagggaactgaacgagaaggcgaatcaaacggcccgtctgttacgcgaaaaagggatcggacgtggcagcattgcggccattatcgcagatcgctcttttgaaatgatcatcggaatcatcggcatcctaaaggcaggcggtgcttatctgccgattgacccagaaaccccgaaagatcgtatcgcgttcatgctgagcgataccaaggcagctgtattgcttacgcagggaaaagcggccgatggcattgactgcgaagcggatatcgtgcaactggaccgtgaagccagcgatggtttttctaaagagccgctgagctctgttaatgatagtggcgacaccgcgtatattatctacacgagtggttccaccgggaccccgaaaggtgtgattaccccgcattattccgttatccgcgtggttcagaacactaactacatcgatatcacagaagacaacgtaatcctccaactatcaaactactcgttcgacggtagtgtgtttgatattttcggtgcgctcctaaacggggcctccctggtgatgatcgagaaagaagcactgttaaacattaatcgtctgggctcagctatcaatgaagagaaagtgagcgtgatgtttattaccacggcgctgttcaacatgattgccgatatccatgttgactgcctctcaaacctgcgtaaaattctgtttggcggcgaacgagcttcgatcccacatgtccgcaaggtactgaaccacgtcggtcgcgataaattaattcacgtatatggcccgactgaatcaacagtgtacgccacctattacttcataaacgaaattgatgacgaggcggaaactatccccataggtagcccgctggccaataccagcgtgctgattatggacgaagcaggcaaactggtcccaattggagtacctggcgaactgtgtatcgctggtgatgggttgtctaaaggttatcttaaccgtgaagagctcaccgcggaaaaatttatcccgcatccattcattcccggtgaacgtctgtacaagacgggcgaccttgccaaatggctcccagatggaaatatcgaatttataggccgcattgatcatcaggttaaaatccgtggctttcgaattgaactgggggagatcgaaagccgtttagaaatgcacgaggacatcaacgaaaccattgtgacggttcgcgaggatgaagagagccggccgtatatctgtgcatacattaccgctaatcgtgaaatttctcttgatgagctcaagggttttctgggggaaaaattacccgagtatatgatcccggcgtacttcgttaagctggataaactgccgttaacgaagaatggtaaagtcgaccggaaagccctgcctgaacccgatcgtactgcgggcgccgagaacgaatatgaggcaccgcgcaatgaaacagaagagaaactggcagctgtctggcaggacgtgttacatgttgaaaaagcaggcattcatgatcactttgctcaaatgggcggtcattcattgcacgcaatggaacttatcgctaagatcaaggaaaagatgaacgttgagatcccgctgcaccagttatttaagttggcgaccattaaagaactgtcggcgttcatcgaggccaatgtgccggttgagcagccatttgtgcatagccctgaagatcgctatcaaccgttcgcgctgaccgacgtacagcaagcctacctggtggggcgtcagccgggatttgccctgggcggtgttggctctcatttcttcgtcgaattcgagattgcagatttagacttgacccgcctggaaacggtttggaaccgtttaatagcacgccacgatatgttgcgtgctattgtacgtgacggtcagcaacaggtgctggaacagaccccgccatgggtgatcccggcgcatactctgcacacaccagaagaggcattacgagttagagaaaaactggctcatcaggtcttaaaccctgaagtctggcccgtatttgatctgcaagtgggctatgttgacggtatgccggcacgtctttggctctgcctagataatctattattggacgggctgagtatgcagattcttctcgccgaactggagcacggatatcgttaccctcaacagctactgcctcccctgccagttacctttcgtgattacttgcaacagccgagccttcagtctccgaacccagacagcctggcatggtggcaggctcaactggatgacatcccgccagcaccggctctcccactgcgttgtctgccacaggaagtggagactcctcgattcgcacggcttaatggcgctctcgattcaacacgttggcatcgtctgaaaaagcgcgcggccgacgcgcacctgactccgtcggccgtgttattgagtgtttggtccacagtcctgtcagcatggtcggctcagccggaatttactttaaacttgacacttttcgatcgtcgccctctgcatccccagattaatcaaatcttgggcgattttacctcacttatgcttctctcgtggcatccgggtgaatcctggctgcacagcgcgcagtctctgcaacagcgcttaagtcaaaacttgaatcaccgtgatgtttccgccattcgcgtcatgcggcagctggcgcaacagcaaaatgtcccggccgtacctatgcccgtggttttcacctctgcgctgggctttgaacaggataacttcctggcccggcgaaatctactgaaaccggtatggggtattagccagacgccgcaagtctggctggatcatcagatctatgaatctgagggcgaactgcgttttaactgggatttcgttgcagctctgtttccggcgggtcaggtggagcgtcagttcgaacaatactgcgcattattgaatcgcatggctgaggatgaaagcgggtggcagctcccgctggcggccctggtgcctcccgttaaacatgcgggtcagtgcgccgagcgcagcccgcgtgtttgtccagaacagtctcaaccgcacatcgcagctgatgaaagtactgtttccctgatatgtgacgcatttcgtgaggtcgtaggggaaagtgtgaccccggctgagaactttttcgaagcgggagccacgtccttaaatttggtacagctgcatgtgcttctccaacgtcacgaattttcaaccctgacgctactggatttattcacgcacccgtcgccagcggcccttgcggactatctcgcgggtgtcgccaccgtagaaaaaacgaagaggcctcggcccgtgagaaggcgtcagcgccggatcggagagccgttcccactcgctcctatgcaacacgccatgtgggtagggcggcacgaccaccaacagctcgggggagtagcaggccatctttacgtcgagtttgacggcgcgagagtcgaccccgatcggttgcgcgctgccgccacccgactcgccctacgtcaccctatgttgagggtacagttcctgcctgacggtacacaaaggatccctccagccgcaggctcgcgggactttcccatcagcgttgcggatcttcgtcacgtagctcctgacgttgtcgatcaacggctcgcgggtattagagacgcaaagtctcatcaacagcttgatggagctgtcttcgagttggctctcactctcctgccaggtgaaaggacgaggctgcacgtcgacctggatatgcaagctgctgacgccatgagctacaggatcctgctggcggacttggccgcactatacgacgggagagagcccccagcactcggttacacgtatagagagtaccgccaggctattgaggccgaggaaacattaccgcaacctgttcgcgacgccgatagggactggtgggcacaaagaataccacagcttccagacccgcccgcactaccgacgcgtgccggtggtgagagagatcgccggcgctcgaccagaagatggcactggttagacccacaaacaagggacgccctcttcgcacgagcacgagctcgtggcatcacacctgcaatgacacttgcggccgcgtttgcaaatgtcctcgcgagatggtccgcctcttcccggttcttactcaatttgccccttttctcgcgccaagcgttgcatccggacgtagacctcttggtaggtgacttcacatcgtcgctgctgttagatgttgacctaggagatacagtgtctaatcttgctcggaagaaccaactgacttttacggaggactgggaacaccggcattggagcggagtagagttgctgcgagaactcaaaaggcaacagcgttacccacacggagcgcccgtggtgttcacttctaatcttgggcgcagtttatattcttctcgggcggagtcccccttgggagagcctgaatggggaatttcgcaaacaccacaggtttggatcgaccatttagcatttgagcaccatggggaagtatggctccaatgggactcgaacgacgccctcttcccacctgctttagtcgagactctgtttgacgcgtactgtcaattgataaaccagctgtgcgacgatgaatccgcatggcaaaagcccttcgcggacatgatgccggcgagtcagcgtgctattcgtgagcgggtgaacgctaccggcgcaccgatcccggagggcctcttacacgaagggatttttcggatcgctcttcaacagcctcaggcgctcgcggtaacggacatgcggtaccaatggaatagttatcgagagatgcgggaacaggtcgtcgctttggcaaatctactccgagagcgcggggtcaagccaggggactcagtcgctgtagcgcttcctcggtcagtcttcctaaccttggctctccacgcgatcgtagaggcgggtgcggcgtggcttcccctcgacacgggctatccggacgatcggttgaagatgatgctagaggatgcacgaccctctctgttaatcacaaccgacgatcaactccccaggttctcagacgtccctaatcttaccagtctatgttacaacgcgcccctcactccacaaggcagcgctcctttacaacttagtcagccgcaccataccgcttatatcatttttacgtccggttccacgggcaggccgaagggtgtaatggtgggccaaactgcaatagtgaatagactattgtggatgcaaaaccactacccgcttaccggggaggacgtagtggctcaaaagactccctgctctttcgatgtcagcgtgtgggagttcttttggccttttatagccggcgctaaattggttatggcggagccggaagctcaccgagaccctttggccatgcaacagttctttgcagagtatggagtcacaacgacgcatttcgtcccatcgatgttagccgcgttcgtagcatcattgacgccacaaactgcgagacagtcatgtgccacacttaagcaagtcttctgctctggtgaggcccttcctgcggacctatgtcgggaatggcaacagcttactggagcccccttgcacaatctttacgggccgactgaggccgcagttgacgtatcgtggtatccagcgttcggggaggagctagcccaagtgcgagggtctagtgttccaattggatacccggtgtggaacacagggttaaggatcctcgacgccatgatgcatccggtaccaccaggtgtcgctggggatttgtacctgactggcattcaactggcacagggttatctagggcggcctgacttaacagctagccgattcatagcagatccattcgctcccggagagcggatgtaccgaacaggcgacgtggcacgctggttagataatggcgctgtcgagtatcttgggcggtcagacgatcagttaaagatacgtggacaacggattgagcttggtgaaatagaccgagttatgcaggcactaccagatgtcgagcaagccgtagcctcttgtgccattgcgcgagaagacattcccgggaacaagcacttggttgcgtacatagtgccgcaagaggagcagacctgcacagagcggtcacgttcaactctcacagtttccttcgtccgttctttcttaaaggagaaactaccagaatatatggtaccgtccgcgatcgtgatattagacgctctgccactcacgccaaatggaaagttggatagaagagctctgcctgctcctgacttgcactcgcaactcctggataaatacgttgctcccagaaacccaatagagactattatcgcggcagcattctcttcattgcttggatgcgacgtccaagatgcggacgcagatttctttgcgctcgggggccatagtctattggccatgaagctcgcagcgcaattgtcgagacaggtagcacggcaagtaacgcccgggcaagtcatggtcgcctcgacagtcgcgaaactcgcgaccattatcgacgctgagctgccagtagaacagccttttgtgcactcaccggaagagcggtatcgaccattcgcgttaacggatgttcagcaagcctacctggtcgggcgccagccgggatttgccctgggcggtgtaggctcgcatttcttcgtggaattcgagatcgcagatctcgacatacaccgcctggaaaaagtgtggaaccgtttaattgcacgtcatgatatgttgcgcgctgtggttcgtgacggtcagcaacgtgtactggaacagaccccgccatgggtcataccagcacatattcttcacagtcctgaagaggcattacaggttcgtgatcgtttagctcaccaagtgttgaaccccgaagtctggccggtatttgatctgcaggtgggcttcgttgacggtatgccggcccgtttatggttgtgccttgataacctgttattggacgggctgagcatgcagattcttctctctgaactggagcatggatatcgctacccacagcaactccctcccccgttgccgatcacttttcgcgattatcttcagcaaccggcactccgtaccccaaatcctgactcattggcttggtggcagacgcaactggatgacatcccacctgcgcccgccctcccgctacgttgtctgcctcaagatgttgaaaccccgcgtttcgcgcgtctgtacggcgcaatggattctgctcgttggcgtcgcctgaaacagcgtgcggccgacgcacatctgactccgtcagctgtcctactgagcgtatggtctacagtgctggcagcttggtcggcgcagccggattttactctcaacctgacattattcgaccggcgaccactgcaccctcagattaatcaaatccttggcgattttacctcactgatgttattgtcgtggcatccgggtgagagttggctgcagtccgcgcgtcttctccagcaacgcctttcagaatcgctcaaccaccgtgatgttagcgccattcgcgtcatgcggcagctggcgagaaggcaaaatgtcccggccgtacccatgccggtcgtatttacctctgcgctggggtttgaacaggataacttcctggcccgtcgcaatctactgaaaccggtgtggggtatcagtcagacgccgcaagtttggctggaccatcaggtctatgaatccgagggcgaactgcgttttaactgggatttcgttgcggccctgtttccggacggtcaagtggaacgtcagttcgcgcaatactgcgccttattgaatcgcatggcagaagatgacagctcttggcagttgccgcttgctgatctggtgcccccgttaaaagtgaccgagcggcgagcgagaaggctgcgtccagaacgcgcccagcctcgtattgcagctgataagagttccgttagtctgatctgtgacacttttcgtgaggtggttggggaacccgtggcaccggctgagaactttttcgaagcgggagccacatccctcaatctggttcagctgcatgtccttctccaacgtcacgaatttgcgaccttaacgctactggatttgttcacccatccaagccctgttgcattggctaactatcttgcgggtgtggccctggaagagaaaacgaagcgcgtgcggccggttcggcgaagacagcgtcgcattcagcacttgcccttagtagctgcgcaacctggaatatggatggccgagaagttatctgaactaccatcagcgtggagcgtagcgcattacgtggagctcactggtgaggttgactcgcctcttttggccagggcggtagtggctggccttgcacaagctgacaccttaagaatgcgtttcacagaggataatggggaagtttggcaatgggtagacgatgcgttaacatttgagttaccggaaatcatagacctgcgcactaacatagaccctcacgggacagctcaggccttgatgcaagcggacctgcaacaggacctacgtgtggattcggggaagcctctggtcttccatcagctaattcaagtagcggacaatcgctggtactggtatcaaaggtaccaccacttgcttgtggacgggttcagttttccagcgataaccaggcaaatagccaacatttattgcacttggttgcgaggagagcctacgcccgcatcccccttcacgccattcgcagacgttgttgaggaataccaacagtatcgcgagagcgaagcgtggcaacgcgatgcggcattctgggcggagcaacgacggcaactaccgcctcccgcatccctatcacctgccccgctccccggccggtccgcgtcagccgacattctacggctaaagctggagttcacagatggtgaatttcgacagcttgctacacaactcagcggggtacaaaggacagacctagcgctcgctctggctgcattatggctaggacgactttgcaatcgaatggactacgcggcgggtttcatatttatgcgccggctcggcagcgcagcgttgaccgcaacgggtccagttttaaatgttcttcctttgggaatccacataggcaacccaagcttctctgagcttctcaccagggttcgcgaggtcgccttaggcgcgtatgcacaccaacatattccttttgagatgttagtagaggcactgcaaccagagcgaaaccttagccatactcctctcttccaagtgatgtttgtccttcagaatgcgcccgcgtcccaattagagttaaccgggatcaccgcaaacccaattaaggttaaatcaactaccacgaagttcgacctaactttaatcatgcaaaacacagctagcggattagtaggtgtttgggagtacaacacggatttattcgacgcgtcaacgattgagcgaatgacagggcactttgtaaccctcctcgagggcgttatcgccaatccacaacagccgatctctcaacttcctattttaactacagtggagcaacagcaacttttagtcgagtggaataacacgcaaaccgactaccccgctgataagtgtatacatcaattattcgaggaacaggtcgagcgcacaccagacgccgttgctgtcgtctttgggaatcagcaactcagctatcgagagatgcgcgaacaagtggttgcactcgccaatttattacgtgagcggggagtcaagccaggagactccgttgccgtggccttaccacgctctgttttcttaacccttgcactacacgcgattgtcgaggcaggtgccgcctggctacctcttgacacaggatatcctgacgatagattaaaaatgatgctcgaggatgcacggccttcccttctgatcacaacagacgatcaattaccccgcttcagtgacgtacctaatctgacctcactctgttacaacgctcccttgacgcctcaagggagcgcccctttacagctgtctcaacctcaccatactgcatatatcatctttacaagtggttctacgggacgccccaagggagtaatggttggtcagactgcgattgtaaatcgtctgttgtggatgcaaaaccactaccctttgacgggggaggacgttgtagcccaaaagactccttgctcgttcgatgtctcagtctgggagttcttttggccatttatagcaggggccaaattagttatggcggagccggaagcccaccgagacccacttgcgatgcagcaattctttgctgagtatggtgtcaccactacacatttcgtcccatcgatgttagcggccttcgtggcttctcttactccacaaacggctaggcaatcttgtgccacactaaagcaagtcttctgctccggcgaggcattacctgcagacttgtgccgggaatggcagcaactcacaggagctccattgcacaatctatacggaccgaccgaggccgcagtagacgtatcttggtatcctgcgtttggcgaggagttagcgcaagtaagaggttcgtcagtaccaataggataccccgtatggaacacggggcttcggatactggacgcgatgatgcatccggtcccaccaggagtcgcgggcgatttatacctgactgggatacagctggcccaaggttacctagggagacctgaccttacggcgtcgaggttcatagcggatccgtttgctccgggtgagcgcatgtaccgtacgggcgacgtcgcgcgatggctagataatggcgccgtagagtatcttggtagatcagacgatcagttaaagatacggggacaacgaatagagcttggggaaatagaccgggtaatgcaggctttgccagatgtcgagcaagcggtggcttcgtgtgctattgcgcgggaggacatacctgggaacaaacaccttgtagcgtacatagttcctcaagaggagcaaacatgcactgagcgatcgaggtccacacttacagtttcgttcgtccggagtttccttaaggagaaactccccgaatatatggtaccgagcgcaatagtgattctagacgctctccccctgactcctaatggaaagctagaccggcgggcgttacccgcccctgacctgcactcacaacttgagacaattattgctgcggctttctcgagcctgctcgggtgcgacgtacaagacgcggatgctgactttttcgcgctaggtggccattcgctgcttgccatgaagctagccgctcagctttcccgacaagtagcgcggcaggtgacaccaggccaagttatggtagcttcgactgtcgcaaagctcgcaacgatcatagacgcggagttagataaatacgtcgctccaaggaacccgataacatccggggaagataaccctatccccctatgtcaaggcgatggggaggagatgagcacatggctacgtcgttttggacccccagtcgaacatcgggccaggctagtgtgtttcccccacgcaggcgcagcggcggattcatacttagacctagcaagagcgttagcaccagagatcgatgttcatgctgttcaataccccggcaggcaagacagaagggacgaggagccattaggaaccgcaggtgaaattgcagatgaagtggcagcggtgctacgtgcgtcgggaggggatgggccttttgcacttttcggccacagtatgggcgccctcatcgcgtacgagacagcaaggcgattagagagggaaccgggagggggacccttacgtttattcgtgagcggacaaacagcgccacgtgtccatgaacgaagaactgatctgcccggtgacgatggactcgtggacgagcttaggcgacttggcacctccgaggcagcgctcgcagacgaagccctgctggctatgtctctcccggtgctcagggcggattatagggtgttaagatcctacgcttgggcggatggtcccccactacgcgccggtataactgccctctgcggtgatgcagacccactaactgcaacaggggatgcggaacgctggttacaacattccgtgattccgggtcggacacggacatttcccggtgggcatttttatttaggggaacaagtgaccgaggtggcaggggctgtccgtagagatttactgagagcagggttagcgggttga

SEQ ID NO: 5 - DNA, 13581 bp, Artificial Sequence
  IHC
atggttgccaaacatagtctggaaaacggtgtctttcacaagatgactgaaaacgagaaggaattgatccttcatttcaacaacactaagacagattaccctaagaacaagacgttgcatgaactttttgaagagcaggcaatgaaaaccccggatcacacagcactggtgttcggcgctcagagaatgacctacagggaactgaacgagaaggcgaatcaaacggcccgtctgttacgcgaaaaagggatcggacgtggcagcattgcggccattatcgcagatcgctcttttgaaatgatcatcggaatcatcggcatcctaaaggcaggcggtgcttatctgccgattgacccagaaaccccgaaagatcgtatcgcgttcatgctgagcgataccaaggcagctgtattgcttacgcagggaaaagcggccgatggcattgactgcgaagcggatatcgtgcaactggaccgtgaagccagcgatggtttttctaaagagccgctgagctctgttaatgatagtggcgacaccgcgtatattatctacacgagtggttccaccgggaccccgaaaggtgtgattaccccgcattattccgttatccgcgtggttcagaacactaactacatcgatatcacagaagacaacgtaatcctccaactatcaaactactcgttcgacggtagtgtgtttgatattttcggtgcgctcctaaacggggcctccctggtgatgatcgagaaagaagcactgttaaacattaatcgtctgggctcagctatcaatgaagagaaagtgagcgtgatgtttattaccacggcgctgttcaacatgattgccgatatccatgttgactgcctctcaaacctgcgtaaaattctgtttggcggcgaacgagcttcgatcccacatgtccgcaaggtactgaaccacgtcggtcgcgataaattaattcacgtatatggcccgactgaatcaacagtgtacgccacctattacttcataaacgaaattgatgacgaggcggaaactatccccataggtagcccgctggccaataccagcgtgctgattatggacgaagcaggcaaactggtcccaattggagtacctggcgaactgtgtatcgctggtgatgggttgtctaaaggttatcttaaccgtgaagagctcaccgcggaaaaatttatcccgcatccattcattcccggtgaacgtctgtacaagacgggcgaccttgccaaatggctcccagatggaaatatcgaatttataggccgcattgatcatcaggttaaaatccgtggctttcgaattgaactgggggagatcgaaagccgtttagaaatgcacgaggacatcaacgaaaccattgtgacggttcgcgaggatgaagagagccggccgtatatctgtgcatacattaccgctaatcgtgaaatttctcttgatgagctcaagggttttctgggggaaaaattacccgagtatatgatcccggcgtacttcgttaagctggataaactgccgttaacgaagaatggtaaagtcgaccggaaagccctgcctgaacccgatcgtactgcgggcgccgagaacgaatatgaggcaccgcgcaatgaaacagaagagaaactggcagctgtctggcaggacgtgttacatgttgaaaaagcaggcattcatgatcactttgctcaaatgggcggtcattcattgcacgcaatggaacttatcgctaagatcaaggaaaagatgaacgttgagatcccgctgcaccagttatttaagttggcgaccattaaagaactgtcggcgttcatcgaggccaatggcctaccccaggaaattaaacacacgccggcggttcggaccacatccgaagatccaattgccatagtatccatggcttgccggttacccggtggtgtgaataccccacagagactatgggaattattacgtgaagggggagaaaccctcagtggcttccctaccgaccgagggtgggacctcgcgaggttgcatcacccagacccagacaaccccggtacgtcatacgttgataaagggggattcctggacgatgcggcagggtttgacgcagaatttttcggtgtgagccccagagaagcagcggctatggacccgcagcagagattactcctcgaaaccagctgggagttagtcgagaatgcagggattgatccacatagcctaagggggaccgccactggtgtcttcctcggcgttgccaagtttgggtatggcgaggatacggcagctgccgaagacgtcgaggggtactctgtcactggtgtagccccggcagtggcgtcgggcagaattagttacacgatggggttggaagggccgtctatttcggttgataccgcctgttcctccagtctggttgcactccaccttgcagtcgagtcgctccggaaaggagaaagcagtatggccgtggtcgggggagcggcggtgatggccacaccgggtgtgtttgtggatttttcccgacagagagccttggccgcggatgggcgttcaaaggcgttcggagcaggtgcagacgggtttggatttagcgaaggtgtgacactggttctcctagaaagattaagtgaagcccggcgtaacggccatgaggtgctggcagttgttagaggttccgcattaaaccaggacggggcttcgaacgggctgagcgccccctcgggcccggcacagagaagagtgatacgccaagcactcgaatcgtgtggcctagaaccaggtgacgttgacgcggtggaagcgcacgggacaggaactgcgttaggggacccgatagaagcaaacgccttgctggacacttatggtagagatcgtgatgcggatcgacccctctggttaggaagtgttaagtcaaatataggacacactcaggcagcggcgggagtaactgggctgctcaaagtagtcctagccttacgcaatggggaactacccgccaccctacatgtcgaggaaccgacaccgcatgtggattggtcgagcgggggagttgctctcttggcgggtaatcagccgtggcgaagaggtgaacgaacccgtagagccgccgtgtccgcattcgggatcagtggtacgaacgcgcacgtgattgtggaagaagctccacaagaggtgagaccagcgcccggtcaaggactctcgcccgcggtgtcaaccttggtagtggcgggtaaaactatgcagcgtgtttcggcaaccgccggtatgctcgcagattggatggaaggcccaggtgcagatgtggcgctggcggacgtggcgcacacgttaaatcatcaccgttcacggcaaccaaagttcggtacggtggtggccagggaccggacacaggcaatcgccggactaagagcgctggcggcgggtcagcacgccccaggggttgttaaccctgctgaaggaagtccaggtccagggacggtgttcgtgtttcctggccaggggtcccagcgtgcaggcatgggggaggagttggctgcggctttccccgtgtttgccagaatccaccagcaagtgtgggatttactcgatgttcctgatctcgacgttaacgaaacggggtacgcacaaccagcactcttcgcactccaagtggcgctgtttgggctcctcgaatcatggggagtacggccggatgccgtggtcgggcatagtgtaggggaattagcggcagggtacgtttccgggctttggagtcttgaggatgcttgcacgctcgtgtcggcgagagcccgtctaatgcaagccttaccggcaggtggtgttatggcggcagttccagtgtccgaagacgaagcacgggctgtgttgggggaaggagtcgaaatagctgcggtcaacggtccgtcgagcgtggttctaagcggtgatgaagcagcagtgctccaggccgcggaagggttaggcaagtggacgcgattaccgacctcgcatgcattccattctgctcgtatggaaccaatgctggaagagtttagagcagtggcggaaggtctaacatacaggactccccaggtggcaatggccgccggagaccaggttatgaccgctgaatactgggtgcgtcaggttagggatacagttcgttttggcgagcaagttgcctcgttcgaggatgctgtattcgtggaattgggagcagatcgctctcttgcacggctagtcgatggtatcgcgatgttgcacggggatcatgaggcacaggctggtatgcggagagaacaacccttgcccttaggtttacgaagattgctaaccgacctgcataacgctggtgctgccgtcgattttagtgttttgtgcccacaaggtcgtctggttgacgcaccgttaccagcctggtcacaccggtttctcttctatgaccgggaaggagtggacaatagatcaccagggggaagcacagtggcggtccacccgcttttactagccgcggtggatgtgccgggccacggtggagcggttttcacgggtagactctcgactgacgagcaaccgtggttagcggagcacgttgtcgggggaagaaccctagttcctggttctgttttagtcgatctagccttagcggcaggcgaagacgtagggctaccggtgttagaagaattagtattgcagaggccgctggtgcttgccggcgcgggagcactcctacggatgtcggtcggggcaccagacgagagcggtagaagaactatcgatgttcacgcagctgaagacgtcgccgatttagcagatgcccaatggtcccagcacgccaccgggactttagcccaaggggtagcggcggggcccagggacacagagcaatggcccccagaggatgccgtccggattccattagacgaccattatgatggtctcgcggaacagggttatgagtacggtccgtcgtttcaggcgctagtggcctacgtggcggaggatgcgactgcgacaatgttagcggaagtcgcgcttccgggcagcattagatcgcaacaaggtctatacgccatccatcccgcactgctggacgcttgttttcaatctgtcggagcccacccagacagtcaatccgtcgggtcaggtctactcgtacccctcggtgttcggagagttcgtgcgtacgcacccgtaaggaccgcccgttattgttacacccgcgtcacgaaagttgaactagctggggttgaggccgacatcgacgttctggatgctcacggcacagtgcttctagccgtgtgcggtcttcgtatcgggaccggagtgagcgagagggacaaacacaacagagttctcaatgagcgcctactcaccatcgaatggcatcagcgtgaactaccagaaatggacccctcgggtgccgggaagtggctcctaatctcggactgtgcagcatccgatgtcaccgctacacgactggctgatgccttccgggagcacagcgctgcgtgcactaccatgcggtggccacttcacgatgatcaactagcagccgccgaccaactccgggaccaggtgggttcagatgagttttctggcgtggtagtactaacagggccaaacacagggacccctcatcagggttccgcagaccgtggcgccgagtacgttaggcggttagttggaatcgctcgtgaacttagcgatcttcccggagcggttccccgtatgtatgtcgtcacaaggggagcgcagagagtccttgccgatgattgtgttaatttagaacagggagggctcagaggtctgctgaggaccatcggtgctgagcacccacatctccgcgccacccaaattgatgttgatgagcagacaggagtagagcagctggcgcgacaactcctagctacatcggaggaagacgagacagcctggagggacaacgaatggtacgttgcgaggttatgccccacacccctgaggccacaggaacgtaggacaatagtggcggaccatcaacagtctggtatgcggttacaaatacgtacgcccggtgcaatcgatagtgtggcctttgaacccgcacccgatgtagagcaacccttacgggcgggtgaagttcgggttgacgttagagcaaccggtgttaatttccgtgacgttctactcgctctcgggatgtatccccagaaagctgacatggggacagaagcagctggtgttgtaacagcagtgggacctgatgtcgatgcgtttgcgcctggtgatagagttctagggctattccaaggggcatttgctccaattgcggtgactgaccatcgtttactggcacgggtgccagacgggtggtcagatgccgatgcggcggcggtgccaatagcttacacgacagcacattatgcgctgcacgacctggcggggttgcgggcggggcaatctgtcctgatacacgcggcagcgggtggtgttggtatggccgctgttgcactggcacggagggccggcgcagaagttctggctaccgcaggacctgcaaaacacggtacgctacgggcattagggctagatgatgaacacatcgcttcgagtcgggagaccgggttcgcgcgtaagttccgagagcggactgggggacgaggagtggacgtcgttctaaacagcttgaccggcgaactattagacgagtccgcggatctcctcgcggaggacggagtcttcgtggaaatgggaaagactgatctgcgcgatgcaggggactttcgtgggcgctacgccccgtttgatctaggggaagcaggcgatgacaggctcggggaaattctacgtgaggtggtgggactgctcggtgcaggggaactcgaccgactccctgttagcgcgtgggaattggggataccccagacggggaagtcgttagtgacgctgccacccgaacaagcgcaagttttcagaccagacggcactgtattgatcaccgggggaacgggaacgttaggtcggctgctggcccgtcatctggttacagagcacggggtgcgtcacctgctgctagtgtcgaggagaggagcagatgcccctggatcggacgagctgagggccgaaatcgaggatctcggagcatcagcggaaattgcagcatgtgatacagccgatcgagacgctctcagcgcgttgctagatggactgccgaggccactgaccggagtagttcacgccgcgggagtcctcgctgacggtctggttacatccatcgacgagcccgcagtcgaacaagttctccgtgcaaaagttgatgcggcctggaacctgcacgagctaactgcgaacaccggtctcagctttttcgtgctgttctcgtcagccgcaagtgtgttagcggggccggggcagggagtatatgcggcagcgaacgaatctttaaacgctctggccgctctgcgtaggactaggggtttacccgcaaaagcattgggatggggattatgggcgatagggcgtgcaatagcatttgccgagcagaccggtgacgcaatcgccccggaggaaggcgcgtacgccttcgagacactactcagacataacagggcgtactcgggttacgctcccgtgatagggtcaccatggctgactgcgttcgcccaacattcgccctttgcggagaagttccagtccctggggcaaaatagatccgggacgtctaagtttctggcagaattagtcgatctgccaagagaagaatggccagatcggttacgtcgtctattagaactggtgaggtctcatgctgccgcagtttcggggtatggatcggcagaccaattaccagaaagaaaagcattcaaagacctcggattcgattcactggcagcagtcgaactaagaaatcgtctagggaccgcgacaggcgtccggctgcccagtactctggtgttcgaccacccaaccccacttgcggttgcggaacatctacgtgatcgtctactgccagtagaacagccttttgtgcactcaccggaagagcggtatcgaccattcgcgttaacggatgttcagcaagcctacctggtcgggcgccagccgggatttgccctgggcggtgtaggctcgcatttcttcgtggaattcgagatcgcagatctcgacatacaccgcctggaaaaagtgtggaaccgtttaattgcacgtcatgatatgttgcgcgctgtggttcgtgacggtcagcaacgtgtactggaacagaccccgccatgggtcataccagcacatattcttcacagtcctgaagaggcattacaggttcgtgatcgtttagctcaccaagtgttgaaccccgaagtctggccggtatttgatctgcaggtgggcttcgttgacggtatgccggcccgtttatggttgtgccttgataacctgttattggacgggctgagcatgcagattcttctctctgaactggagcatggatatcgctacccacagcaactccctcccccgttgccgatcacttttcgcgattatcttcagcaaccggcactccgtaccccaaatcctgactcattggcttggtggcagacgcaactggatgacatcccacctgcgcccgccctcccgctacgttgtctgcctcaagatgttgaaaccccgcgtttcgcgcgtctgtacggcgcaatggattctgctcgttggcgtcgcctgaaacagcgtgcggccgacgcacatctgactccgtcagctgtcctactgagcgtatggtctacagtgctggcagcttggtcggcgcagccggattttactctcaacctgacattattcgaccggcgaccactgcaccctcagattaatcaaatccttggcgattttacctcactgatgttattgtcgtggcatccgggtgagagttggctgcagtccgcgcgtcttctccagcaacgcctttcagaatcgctcaaccaccgtgatgttagcgccattcgcgtcatgcggcagctggcgagaaggcaaaatgtcccggccgtacccatgccggtcgtatttacctctgcgctggggtttgaacaggataacttcctggcccgtcgcaatctactgaaaccggtgtggggtatcagtcagacgccgcaagtttggctggaccatcaggtctatgaatccgagggcgaactgcgttttaactgggatttcgttgcggccctgtttccggacggtcaagtggaacgtcagttcgcgcaatactgcgccttattgaatcgcatggcagaagatgacagctcttggcagttgccgcttgctgatctggtgcccccgttaaaagtgaccgagcggcgagcgagaaggctgcgtccagaacgcgcccagcctcgtattgcagctgataagagttccgttagtctgatctgtgacacttttcgtgaggtggttggggaacccgtggcaccggctgagaactttttcgaagcgggagccacatccctcaatctggttcagctgcatgtccttctccaacgtcacgaatttgcgaccttaacgctactggatttgttcacccatccaagccctgttgcattggctaactatcttgcgggtgtggccctggaagagaaaacgaagcgcgtgcggccggttcggcgaagacagcgtcgcattggagagccgttcccactcgctcctatgcaacacgccatgtgggtagggcggcacgaccaccaacagctcgggggagtagcaggccatctttacgtcgagtttgacggcgcgagagtcgaccccgatcggttgcgcgctgccgccacccgactcgccctacgtcaccctatgttgagggtacagttcctgcctgacggtacacaaaggatccctccagccgcaggctcgcgggactttcccatcagcgttgcggatcttcgtcacgtagctcctgacgttgtcgatcaacggctcgcgggtattagagacgcaaagtctcatcaacagcttgatggagctgtcttcgagttggctctcactctcctgccaggtgaaaggacgaggctgcacgtcgacctggatatgcaagctgctgacgccatgagctacaggatcctgctggcggacttggccgcactatacgacgggagagagcccccagcactcggttacacgtatagagagtaccgccaggctattgaggccgaggaaacattaccgcaacctgttcgcgacgccgatagggactggtgggcacaaagaataccacagcttccagacccgcccgcactaccgacgcgtgccggtggtgagagagatcgccggcgctcgaccagaagatggcactggttagacccacaaacaagggacgccctcttcgcacgagcacgagctcgtggcatcacacctgcaatgacacttgcggccgcgtttgcaaatgtcctcgcgagatggtccgcctcttcccggttcttactcaatttgccccttttctcgcgccaagcgttgcatccggacgtagacctcttggtaggtgacttcacatcgtcgctgctgttagatgttgacctaggagatacagtgtctaatcttgctcggaagaaccaactgacttttacggaggactgggaacaccggcattggagcggagtagagttgctgcgagaactcaaaaggcaacagcgttacccacacggagcgcccgtggtgttcacttctaatcttgggcgcagtttatattcttctcgggcggagtcccccttgggagagcctgaatggggaatttcgcaaacaccacaggtttggatcgaccatttagcatttgagcaccatggggaagtatggctccaatgggactcgaacgacgccctcttcccacctgctttagtcgagactctgtttgacgcgtactgtcaattgataaaccagctgtgcgacgatgaatccgcatggcaaaagcccttcgcggacatgatgccggcgagtcagcgtgctattcgtgagcgggtgaacgctaccggcgcaccgatcccggagggcctcttacacgaagggatttttcggatcgctcttcaacagcctcaggcgctcgcggtaacggacatgcggtaccaatggaatagttatcgagagatgcgggaacaggtcgtcgctttggcaaatctactccgagagcgcggggtcaagccaggggactcagtcgctgtagcgcttcctcggtcagtcttcctaaccttggctctccacgcgatcgtagaggcgggtgcggcgtggcttcccctcgacacgggctatccggacgatcggttgaagatgatgctagaggatgcacgaccctctctgttaatcacaaccgacgatcaactccccaggttctcagacgtccctaatcttaccagtctatgttacaacgcgcccctcactccacaaggcagcgctcctttacaacttagtcagccgcaccataccgcttatatcatttttacgtccggttccacgggcaggccgaagggtgtaatggtgggccaaactgcaatagtgaatagactattgtggatgcaaaaccactacccgcttaccggggaggacgtagtggctcaaaagactccctgctctttcgatgtcagcgtgtgggagttcttttggccttttatagccggcgctaaattggttatggcggagccggaagctcaccgagaccctttggccatgcaacagttctttgcagagtatggagtcacaacgacgcatttcgtcccatcgatgttagccgcgttcgtagcatcattgacgccacaaactgcgagacagtcatgtgccacacttaagcaagtcttctgctctggtgaggcccttcctgcggacctatgtcgggaatggcaacagcttactggagcccccttgcacaatctttacgggccgactgaggccgcagttgacgtatcgtggtatccagcgttcggggaggagctagcccaagtgcgagggtctagtgttccaattggatacccggtgtggaacacagggttaaggatcctcgacgccatgatgcatccggtaccaccaggtgtcgctggggatttgtacctgactggcattcaactggcacagggttatctagggcggcctgacttaacagctagccgattcatagcagatccattcgctcccggagagcggatgtaccgaacaggcgacgtggcacgctggttagataatggcgctgtcgagtatcttgggcggtcagacgatcagttaaagatacgtggacaacggattgagcttggtgaaatagaccgagttatgcaggcactaccagatgtcgagcaagccgtagcctcttgtgccattgcgcgagaagacattcccgggaacaagcacttggttgcgtacatagtgccgcaagaggagcagacctgcacagagcggtcacgttcaactctcacagtttccttcgtccgttctttcttaaaggagaaactaccagaatatatggtaccgtccgcgatcgtgatattagacgctctgccactcacgccaaatggaaagttggatagaagagctctgcctgctcctgacttgcactcgcaactcctggataaatacgttgctcccagaaacccaatagagactattatcgcggcagcattctcttcattgcttggatgcgacgtccaagatgcggacgcagatttctttgcgctcgggggccatagtctattggccatgaagctcgcagcgcaattgtcgagacaggtagcacggcaagtaacgcccgggcaagtcatggtcgcctcgacagtcgcgaaactcgcgaccattatcgacgctgagacatccggggaagataaccctatccccctatgtcaaggcgatggggaggagatgagcacatggctacgtcgttttggacccccagtcgaacatcgggccaggctagtgtgtttcccccacgcaggcgcagcggcggattcatacttagacctagcaagagcgttagcaccagagatcgatgttcatgctgttcaataccccggcaggcaagacagaagggacgaggagccattaggaaccgcaggtgaaattgcagatgaagtggcagcggtgctacgtgcgtcgggaggggatgggccttttgcacttttcggccacagtatgggcgccctcatcgcgtacgagacagcaaggcgattagagagggaaccgggagggggacccttacgtttattcgtgagcggacaaacagcgccacgtgtccatgaacgaagaactgatctgcccggtgacgatggactcgtggacgagcttaggcgacttggcacctccgaggcagcgctcgcagacgaagccctgctggctatgtctctcccggtgctcagggcggattatagggtgttaagatcctacgcttgggcggatggtcccccactacgcgccggtataactgccctctgcggtgatgcagacccactaactgcaacaggggatgcggaacgctggttacaacattccgtgattccgggtcggacacggacatttcccggtgggcatttttatttaggggaacaagtgaccgaggtggcaggggctgtccgtagagatttactgagagcagggttagcgggttga

SEQ ID NO: 6 - DNA, 14904 bp, Artificial Sequence
  IHH
atggttgccaaacatagtctggaaaacggtgtctttcacaagatgactgaaaacgagaaggaattgatccttcatttcaacaacactaagacagattaccctaagaacaagacgttgcatgaactttttgaagagcaggcaatgaaaaccccggatcacacagcactggtgttcggcgctcagagaatgacctacagggaactgaacgagaaggcgaatcaaacggcccgtctgttacgcgaaaaagggatcggacgtggcagcattgcggccattatcgcagatcgctcttttgaaatgatcatcggaatcatcggcatcctaaaggcaggcggtgcttatctgccgattgacccagaaaccccgaaagatcgtatcgcgttcatgctgagcgataccaaggcagctgtattgcttacgcagggaaaagcggccgatggcattgactgcgaagcggatatcgtgcaactggaccgtgaagccagcgatggtttttctaaagagccgctgagctctgttaatgatagtggcgacaccgcgtatattatctacacgagtggttccaccgggaccccgaaaggtgtgattaccccgcattattccgttatccgcgtggttcagaacactaactacatcgatatcacagaagacaacgtaatcctccaactatcaaactactcgttcgacggtagtgtgtttgatattttcggtgcgctcctaaacggggcctccctggtgatgatcgagaaagaagcactgttaaacattaatcgtctgggctcagctatcaatgaagagaaagtgagcgtgatgtttattaccacggcgctgttcaacatgattgccgatatccatgttgactgcctctcaaacctgcgtaaaattctgtttggcggcgaacgagcttcgatcccacatgtccgcaaggtactgaaccacgtcggtcgcgataaattaattcacgtatatggcccgactgaatcaacagtgtacgccacctattacttcataaacgaaattgatgacgaggcggaaactatccccataggtagcccgctggccaataccagcgtgctgattatggacgaagcaggcaaactggtcccaattggagtacctggcgaactgtgtatcgctggtgatgggttgtctaaaggttatcttaaccgtgaagagctcaccgcggaaaaatttatcccgcatccattcattcccggtgaacgtctgtacaagacgggcgaccttgccaaatggctcccagatggaaatatcgaatttataggccgcattgatcatcaggttaaaatccgtggctttcgaattgaactgggggagatcgaaagccgtttagaaatgcacgaggacatcaacgaaaccattgtgacggttcgcgaggatgaagagagccggccgtatatctgtgcatacattaccgctaatcgtgaaatttctcttgatgagctcaagggttttctgggggaaaaattacccgagtatatgatcccggcgtacttcgttaagctggataaactgccgttaacgaagaatggtaaagtcgaccggaaagccctgcctgaacccgatcgtactgcgggcgccgagaacgaatatgaggcaccgcgcaatgaaacagaagagaaactggcagctgtctggcaggacgtgttacatgttgaaaaagcaggcattcatgatcactttgctcaaatgggcggtcattcattgcacgcaatggaacttatcgctaagatcaaggaaaagatgaacgttgagatcccgctgcaccagttatttaagttggcgaccattaaagaactgtcggcgttcatcgaggccaatggcctaccccaggaaattaaacacacgccggcggttcggaccacatccgaagatccaattgccatagtatccatggcttgccggttacccggtggtgtgaataccccacagagactatgggaattattacgtgaagggggagaaaccctcagtggcttccctaccgaccgagggtgggacctcgcgaggttgcatcacccagacccagacaaccccggtacgtcatacgttgataaagggggattcctggacgatgcggcagggtttgacgcagaatttttcggtgtgagccccagagaagcagcggctatggacccgcagcagagattactcctcgaaaccagctgggagttagtcgagaatgcagggattgatccacatagcctaagggggaccgccactggtgtcttcctcggcgttgccaagtttgggtatggcgaggatacggcagctgccgaagacgtcgaggggtactctgtcactggtgtagccccggcagtggcgtcgggcagaattagttacacgatggggttggaagggccgtctatttcggttgataccgcctgttcctccagtctggttgcactccaccttgcagtcgagtcgctccggaaaggagaaagcagtatggccgtggtcgggggagcggcggtgatggccacaccgggtgtgtttgtggatttttcccgacagagagccttggccgcggatgggcgttcaaaggcgttcggagcaggtgcagacgggtttggatttagcgaaggtgtgacactggttctcctagaaagattaagtgaagcccggcgtaacggccatgaggtgctggcagttgttagaggttccgcattaaaccaggacggggcttcgaacgggctgagcgccccctcgggcccggcacagagaagagtgatacgccaagcactcgaatcgtgtggcctagaaccaggtgacgttgacgcggtggaagcgcacgggacaggaactgcgttaggggacccgatagaagcaaacgccttgctggacacttatggtagagatcgtgatgcggatcgacccctctggttaggaagtgttaagtcaaatataggacacactcaggcagcggcgggagtaactgggctgctcaaagtagtcctagccttacgcaatggggaactacccgccaccctacatgtcgaggaaccgacaccgcatgtggattggtcgagcgggggagttgctctcttggcgggtaatcagccgtggcgaagaggtgaacgaacccgtagagccgccgtgtccgcattcgggatcagtggtacgaacgcgcacgtgattgtggaagaagctccacaagaggtgagaccagcgcccggtcaaggactctcgcccgcggtgtcaaccttggtagtggcgggtaaaactatgcagcgtgtttcggcaaccgccggtatgctcgcagattggatggaaggcccaggtgcagatgtggcgctggcggacgtggcgcacacgttaaatcatcaccgttcacggcaaccaaagttcggtacggtggtggccagggaccggacacaggcaatcgccggactaagagcgctggcggcgggtcagcacgccccaggggttgttaaccctgctgaaggaagtccaggtccagggacggtgttcgtgtttcctggccaggggtcccagcgtgcaggcatgggggaggagttggctgcggctttccccgtgtttgccagaatccaccagcaagtgtgggatttactcgatgttcctgatctcgacgttaacgaaacggggtacgcacaaccagcactcttcgcactccaagtggcgctgtttgggctcctcgaatcatggggagtacggccggatgccgtggtcgggcatagtgtaggggaattagcggcagggtacgtttccgggctttggagtcttgaggatgcttgcacgctcgtgtcggcgagagcccgtctaatgcaagccttaccggcaggtggtgttatggcggcagttccagtgtccgaagacgaagcacgggctgtgttgggggaaggagtcgaaatagctgcggtcaacggtccgtcgagcgtggttctaagcggtgatgaagcagcagtgctccaggccgcggaagggttaggcaagtggacgcgattaccgacctcgcatgcattccattctgctcgtatggaaccaatgctggaagagtttagagcagtggcggaaggtctaacatacaggactccccaggtggcaatggccgccggagaccaggttatgaccgctgaatactgggtgcgtcaggttagggatacagttcgttttggcgagcaagttgcctcgttcgaggatgctgtattcgtggaattgggagcagatcgctctcttgcacggctagtcgatggtatcgcgatgttgcacggggatcatgaggcacaggctggtatgcggagagaacaacccttgcccttaggtttacgaagattgctaaccgacctgcataacgctggtgctgccgtcgattttagtgttttgtgcccacaaggtcgtctggttgacgcaccgttaccagcctggtcacaccggtttctcttctatgaccgggaaggagtggacaatagatcaccagggggaagcacagtggcggtccacccgcttttactagccgcggtggatgtgccgggccacggtggagcggttttcacgggtagactctcgactgacgagcaaccgtggttagcggagcacgttgtcgggggaagaaccctagttcctggttctgttttagtcgatctagccttagcggcaggcgaagacgtagggctaccggtgttagaagaattagtattgcagaggccgctggtgcttgccggcgcgggagcactcctacggatgtcggtcggggcaccagacgagagcggtagaagaactatcgatgttcacgcagctgaagacgtcgccgatttagcagatgcccaatggtcccagcacgccaccgggactttagcccaaggggtagcggcggggcccagggacacagagcaatggcccccagaggatgccgtccggattccattagacgaccattatgatggtctcgcggaacagggttatgagtacggtccgtcgtttcaggcgctagtggcctacgtggcggaggatgcgactgcgacaatgttagcggaagtcgcgcttccgggcagcattagatcgcaacaaggtctatacgccatccatcccgcactgctggacgcttgttttcaatctgtcggagcccacccagacagtcaatccgtcgggtcaggtctactcgtacccctcggtgttcggagagttcgtgcgtacgcacccgtaaggaccgcccgttattgttacacccgcgtcacgaaagttgaactagctggggttgaggccgacatcgacgttctggatgctcacggcacagtgcttctagccgtgtgcggtcttcgtatcgggaccggagtgagcgagagggacaaacacaacagagttctcaatgagcgcctactcaccatcgaatggcatcagcgtgaactaccagaaatggacccctcgggtgccgggaagtggctcctaatctcggactgtgcagcatccgatgtcaccgctacacgactggctgatgccttccgggagcacagcgctgcgtgcactaccatgcggtggccacttcacgatgatcaactagcagccgccgaccaactccgggaccaggtgggttcagatgagttttctggcgtggtagtactaacagggccaaacacagggacccctcatcagggttccgcagaccgtggcgccgagtacgttaggcggttagttggaatcgctcgtgaacttagcgatcttcccggagcggttccccgtatgtatgtcgtcacaaggggagcgcagagagtccttgccgatgattgtgttaatttagaacagggagggctcagaggtctgctgaggaccatcggtgctgagcacccacatctccgcgccacccaaattgatgttgatgagcagacaggagtagagcagctggcgcgacaactcctagctacatcggaggaagacgagacagcctggagggacaacgaatggtacgttgcgaggttatgccccacacccctgaggccacaggaacgtaggacaatagtggcggaccatcaacagtctggtatgcggttacaaatacgtacgcccggtgcaatcgatagtgtggcctttgaacccgcacccgatgtagagcaacccttacgggcgggtgaagttcgggttgacgttagagcaaccggtgttaatttccgtgacgttctactcgctctcgggatgtatccccagaaagctgacatggggacagaagcagctggtgttgtaacagcagtgggacctgatgtcgatgcgtttgcgcctggtgatagagttctagggctattccaaggggcatttgctccaattgcggtgactgaccatcgtttactggcacgggtgccagacgggtggtcagatgccgatgcggcggcggtgccaatagcttacacgacagcacattatgcgctgcacgacctggcggggttgcgggcggggcaatctgtcctgatacacgcggcagcgggtggtgttggtatggccgctgttgcactggcacggagggccggcgcagaagttctggctaccgcaggacctgcaaaacacggtacgctacgggcattagggctagatgatgaacacatcgcttcgagtcgggagaccgggttcgcgcgtaagttccgagagcggactgggggacgaggagtggacgtcgttctaaacagcttgaccggcgaactattagacgagtccgcggatctcctcgcggaggacggagtcttcgtggaaatgggaaagactgatctgcgcgatgcaggggactttcgtgggcgctacgccccgtttgatctaggggaagcaggcgatgacaggctcggggaaattctacgtgaggtggtgggactgctcggtgcaggggaactcgaccgactccctgttagcgcgtgggaattggggataccccagacggggaagtcgttagtgacgctgccacccgaacaagcgcaagttttcagaccagacggcactgtattgatcaccgggggaacgggaacgttaggtcggctgctggcccgtcatctggttacagagcacggggtgcgtcacctgctgctagtgtcgaggagaggagcagatgcccctggatcggacgagctgagggccgaaatcgaggatctcggagcatcagcggaaattgcagcatgtgatacagccgatcgagacgctctcagcgcgttgctagatggactgccgaggccactgaccggagtagttcacgccgcgggagtcctcgctgacggtctggttacatccatcgacgagcccgcagtcgaacaagttctccgtgcaaaagttgatgcggcctggaacctgcacgagctaactgcgaacaccggtctcagctttttcgtgctgttctcgtcagccgcaagtgtgttagcggggccggggcagggagtatatgcggcagcgaacgaatctttaaacgctctggccgctctgcgtaggactaggggtttacccgcaaaagcattgggatggggattatgggcgatagggcgtgcaatagcatttgccgagcagaccggtgacgcaatcgccccggaggaaggcgcgtacgccttcgagacactactcagacataacagggcgtactcgggttacgctcccgtgatagggtcaccatggctgactgcgttcgcccaacattcgccctttgcggagaagttccagtccctggggcaaaatagatccgggacgtctaagtttctggcagaattagtcgatctgccaagagaagaatggccagatcggttacgtcgtctattagaactggtgaggtctcatgctgccgcagtttcggggtatggatcggcagaccaattaccagaaagaaaagcattcaaagacctcggattcgattcactggcagcagtcgaactaagaaatcgtctagggaccgcgacaggcgtccggctgcccagtactctggtgttcgaccacccaaccccacttgcggttgcggaacatctacgtgatcgtctacctggaattggggcgctagttcccgctcccgtggtaatcgcagcaggccgtacggaggaaccaattgccatagtatccatggcttgccggttacccggtggtgtgaataccccacagagactatgggaattattacgtgaagggggagaaaccctcagtggcttccctaccgaccgagggtgggacctcgcgaggttgcatcacccagacccagacaaccccggtacgtcatacgttgataaagggggattcctggacgatgcggcagggtttgacgcagaatttttcggtgtgagccccagagaagcagcggctatggacccgcagcagagattactcctcgaaaccagctgggagttagtcgagaatgcagggattgatccacatagcctaagggggaccgccactggtgtcttcctcggcgttgccaagtttgggtatggcgaggatacggcagctgccgaagacgtcgaggggtactctgtcactggtgtagccccggcagtggcgtcgggcagaattagttacacgatggggttggaagggccgtctatttcggttgataccgcctgttcctccagtctggttgcactccaccttgcagtcgagtcgctccggaaaggagaaagcagtatggccgtggtcgggggagcggcggtgatggccacaccgggtgtgtttgtggatttttcccgacagagagccttggccgcggatgggcgttcaaaggcgttcggagcaggtgcagacgggtttggatttagcgaaggtgtgacactggttctcctagaaagattaagtgaagcccggcgtaacggccatgaggtgctggcagttgttagaggttccgcattaaaccaggacggggcttcgaacgggctgagcgccccctcgggcccggcacagagaagagtgatacgccaagcactcgaatcgtgtggcctagaaccaggtgacgttgacgcggtggaagcgcacgggacaggaactgcgttaggggacccgatagaagcaaacgccttgctggacacttatggtagagatcgtgatgcggatcgacccctctggttaggaagtgttaagtcaaatataggacacactcaggcagcggcgggagtaactgggctgctcaaagtagtcctagccttacgcaatggggaactacccgccaccctacatgtcgaggaaccgacaccgcatgtggattggtcgagcgggggagttgctctcttggcgggtaatcagccgtggcgaagaggtgaacgaacccgtagagccgccgtgtccgcattcgggatcagtggtacgaacgcgcacgtgattgtggaagaagctccacaagaggtgagaccagcgcccggtcaaggactctcgcccgcggtgtcaaccttggtagtggcgggtaaaactatgcagcgtgtttcggcaaccgccggtatgctcgcagattggatggaaggcccaggtgcagatgtggcgctggcggacgtggcgcacacgttaaatcatcaccgttcacggcaaccaaagttcggtacggtggtggccagggaccggacacaggcaatcgccggactaagagcgctggcggcgggtcagcacgccccaggggttgttaaccctgctgaaggaagtccaggtccagggacggtgttcgtgtttcctggccaggggtcccagcgtgcaggcatgggggaggagttggctgcggctttccccgtgtttgccagaatccaccagcaagtgtgggatttactcgatgttcctgatctcgacgttaacgaaacggggtacgcacaaccagcactcttcgcactccaagtggcgctgtttgggctcctcgaatcatggggagtacggccggatgccgtggtcgggcatagtgtaggggaattagcggcagggtacgtttccgggctttggagtcttgaggatgcttgcacgctcgtgtcggcgagagcccgtctaatgcaagccttaccggcaggtggtgttatggcggcagttccagtgtccgaagacgaagcacgggctgtgttgggggaaggagtcgaaatagctgcggtcaacggtccgtcgagcgtggttctaagcggtgatgaagcagcagtgctccaggccgcggaagggttaggcaagtggacgcgattaccgacctcgcatgcattccattctgctcgtatggaaccaatgctggaagagtttagagcagtggcggaaggtctaacatacaggactccccaggtggcaatggccgccggagaccaggttatgaccgctgaatactgggtgcgtcaggttagggatacagttcgttttggcgagcaagttgcctcgttcgaggatgctgtattcgtggaattgggagcagatcgctctcttgcacggctagtcgatggtatcgcgatgttgcacggggatcatgaggcacaggctggtatgcggagagaacaacccttgcccttaggtttacgaagattgctaaccgacctgcataacgctggtgctgccgtcgattttagtgttttgtgcccacaaggtcgtctggttgacgcaccgttaccagcctggtcacaccggtttctcttctatgaccgggaaggagtggacaatagatcaccagggggaagcacagtggcggtccacccgcttttactagccgcggtggatgtgccgggccacggtggagcggttttcacgggtagactctcgactgacgagcaaccgtggttagcggagcacgttgtcgggggaagaaccctagttcctggttctgttttagtcgatctagccttagcggcaggcgaagacgtagggctaccggtgttagaagaattagtattgcagaggccgctggtgcttgccggcgcgggagcactcctacggatgtcggtcggggcaccagacgagagcggtagaagaactatcgatgttcacgcagctgaagacgtcgccgatttagcagatgcccaatggtcccagcacgccaccgggactttagcccaaggggtagcggcggggcccagggacacagagcaatggcccccagaggatgccgtccggattccattagacgaccattatgatggtctcgcggaacagggttatgagtacggtccgtcgtttcaggcgctagtggcctacgtggcggaggatgcgactgcgacaatgttagcggaagtcgcgcttccgggcagcattagatcgcaacaaggtctatacgccatccatcccgcactgctggacgcttgttttcaatctgtcggagcccacccagacagtcaatccgtcgggtcaggtctactcgtacccctcggtgttcggagagttcgtgcgtacgcacccgtaaggaccgcccgttattgttacacccgcgtcacgaaagttgaactagctggggttgaggccgacatcgacgttctggatgctcacggcacagtgcttctagccgtgtgcggtcttcgtatcgggaccggagtgagcgagagggacaaacacaacagagttctcaatgagcgcctactcaccatcgaatggcatcagcgtgaactaccagaaatggacccctcgggtgccgggaagtggctcctaatctcggactgtgcagcatccgatgtcaccgctacacgactggctgatgccttccgggagcacagcgctgcgtgcactaccatgcggtggccacttcacgatgatcaactagcagccgccgaccaactccgggaccaggtgggttcagatgagttttctggcgtggtagtactaacagggccaaacacagggacccctcatcagggttccgcagaccgtggcgccgagtacgttaggcggttagttggaatcgctcgtgaacttagcgatcttcccggagcggttccccgtatgtatgtcgtcacaaggggagcgcagagagtccttgccgatgattgtgttaatttagaacagggagggctcagaggtctgctgaggaccatcggtgctgagcacccacatctccgcgccacccaaattgatgttgatgagcagacaggagtagagcagctggcgcgacaactcctagctacatcggaggaagacgagacagcctggagggacaacgaatggtacgttgcgaggttatgccccacacccctgaggccacaggaacgtaggacaatagtggcggaccatcaacagtctggtatgcggttacaaatacgtacgcccggtgcaatcgatagtgtggcctttgaacccgcacccgatgtagagcaacccttacgggcgggtgaagttcgggttgacgttagagcaaccggtgttaatttccgtgacgttctactcgctctcgggatgtatccccagaaagctgacatggggacagaagcagctggtgttgtaacagcagtgggacctgatgtcgatgcgtttgcgcctggtgatagagttctagggctattccaaggggcatttgctccaattgcggtgactgaccatcgtttactggcacgggtgccagacgggtggtcagatgccgatgcggcggcggtgccaatagcttacacgacagcacattatgcgctgcacgacctggcggggttgcgggcggggcaatctgtcctgatacacgcggcagcgggtggtgttggtatggccgctgttgcactggcacggagggccggcgcagaagttctggctaccgcaggacctgcaaaacacggtacgctacgggcattagggctagatgatgaacacatcgcttcgagtcgggagaccgggttcgcgcgtaagttccgagagcggactgggggacgaggagtggacgtcgttctaaacagcttgaccggcgaactattagacgagtccgcggatctcctcgcggaggacggagtcttcgtggaaatgggaaagactgatctgcgcgatgcaggggactttcgtgggcgctacgccccgtttgatctaggggaagcaggcgatgacaggctcggggaaattctacgtgaggtggtgggactgctcggtgcaggggaactcgaccgactccctgttagcgcgtgggaattggggataccccagacggggaagtcgttagtgacgctgccacccgaacaagcgcaagttttcagaccagacggcactgtattgatcaccgggggaacgggaacgttaggtcggctgctggcccgtcatctggttacagagcacggggtgcgtcacctgctgctagtgtcgaggagaggagcagatgcccctggatcggacgagctgagggccgaaatcgaggatctcggagcatcagcggaaattgcagcatgtgatacagccgatcgagacgctctcagcgcgttgctagatggactgccgaggccactgaccggagtagttcacgccgcgggagtcctcgctgacggtctggttacatccatcgacgagcccgcagtcgaacaagttctccgtgcaaaagttgatgcggcctggaacctgcacgagctaactgcgaacaccggtctcagctttttcgtgctgttctcgtcagccgcaagtgtgttagcggggccggggcagggagtatatgcggcagcgaacgaatctttaaacgctctggccgctctgcgtaggactaggggtttacccgcaaaagcattgggatggggattatgggcgatagggcgtgcaatagcatttgccgagcagaccggtgacgcaatcgccccggaggaaggcgcgtacgccttcgagacactactcagacataacagggcgtactcgggttacgctcccgtgatagggtcaccatggctgactgcgttcgcccaacattcgccctttgcggagaagttccagtccctggggcaaaatagatccgggacgtctaagtttctggcagaattagtcgatctgccaagagaagaatggccagatcggttacgtcgtctattagaactggtgaggtctcatgctgccgcagtttcggggtatggatcggcagaccaattaccagaaagaaaagcattcaaagacctcggattcgattcactggcagcagtcgaactaagaaatcgtctagggaccgcgacaggcgtccggctgcccagtactctggtgttcgaccacccaaccccacttgcggttgcggaacatctacgtgatcgtctaacatccggggaagataaccctatccccctatgtcaaggcgatggggaggagatgagcacatggctacgtcgttttggacccccagtcgaacatcgggccaggctagtgtgtttcccccacgcaggcgcagcggcggattcatacttagacctagcaagagcgttagcaccagagatcgatgttcatgctgttcaataccccggcaggcaagacagaagggacgaggagccattaggaaccgcaggtgaaattgcagatgaagtggcagcggtgctacgtgcgtcgggaggggatgggccttttgcacttttcggccacagtatgggcgccctcatcgcgtacgagacagcaaggcgattagagagggaaccgggagggggacccttacgtttattcgtgagcggacaaacagcgccacgtgtccatgaacgaagaactgatctgcccggtgacgatggactcgtggacgagcttaggcgacttggcacctccgaggcagcgctcgcagacgaagccctgctggctatgtctctcccggtgctcagggcggattatagggtgttaagatcctacgcttgggcggatggtcccccactacgcgccggtataactgccctctgcggtgatgcagacccactaactgcaacaggggatgcggaacgctggttacaacattccgtgattccgggtcggacacggacatttcccggtgggcatttttatttaggggaacaagtgaccgaggtggcaggggctgtccgtagagatttactgagagcagggttagcgggttga

SEQ ID NO: 7 - DNA, 13251 bp, Artificial Sequence
  IHO
atggttgccaaacatagtctggaaaacggtgtctttcacaagatgactgaaaacgagaaggaattgatccttcatttcaacaacactaagacagattaccctaagaacaagacgttgcatgaactttttgaagagcaggcaatgaaaaccccggatcacacagcactggtgttcggcgctcagagaatgacctacagggaactgaacgagaaggcgaatcaaacggcccgtctgttacgcgaaaaagggatcggacgtggcagcattgcggccattatcgcagatcgctcttttgaaatgatcatcggaatcatcggcatcctaaaggcaggcggtgcttatctgccgattgacccagaaaccccgaaagatcgtatcgcgttcatgctgagcgataccaaggcagctgtattgcttacgcagggaaaagcggccgatggcattgactgcgaagcggatatcgtgcaactggaccgtgaagccagcgatggtttttctaaagagccgctgagctctgttaatgatagtggcgacaccgcgtatattatctacacgagtggttccaccgggaccccgaaaggtgtgattaccccgcattattccgttatccgcgtggttcagaacactaactacatcgatatcacagaagacaacgtaatcctccaactatcaaactactcgttcgacggtagtgtgtttgatattttcggtgcgctcctaaacggggcctccctggtgatgatcgagaaagaagcactgttaaacattaatcgtctgggctcagctatcaatgaagagaaagtgagcgtgatgtttattaccacggcgctgttcaacatgattgccgatatccatgttgactgcctctcaaacctgcgtaaaattctgtttggcggcgaacgagcttcgatcccacatgtccgcaaggtactgaaccacgtcggtcgcgataaattaattcacgtatatggcccgactgaatcaacagtgtacgccacctattacttcataaacgaaattgatgacgaggcggaaactatccccataggtagcccgctggccaataccagcgtgctgattatggacgaagcaggcaaactggtcccaattggagtacctggcgaactgtgtatcgctggtgatgggttgtctaaaggttatcttaaccgtgaagagctcaccgcggaaaaatttatcccgcatccattcattcccggtgaacgtctgtacaagacgggcgaccttgccaaatggctcccagatggaaatatcgaatttataggccgcattgatcatcaggttaaaatccgtggctttcgaattgaactgggggagatcgaaagccgtttagaaatgcacgaggacatcaacgaaaccattgtgacggttcgcgaggatgaagagagccggccgtatatctgtgcatacattaccgctaatcgtgaaatttctcttgatgagctcaagggttttctgggggaaaaattacccgagtatatgatcccggcgtacttcgttaagctggataaactgccgttaacgaagaatggtaaagtcgaccggaaagccctgcctgaacccgatcgtactgcgggcgccgagaacgaatatgaggcaccgcgcaatgaaacagaagagaaactggcagctgtctggcaggacgtgttacatgttgaaaaagcaggcattcatgatcactttgctcaaatgggcggtcattcattgcacgcaatggaacttatcgctaagatcaaggaaaagatgaacgttgagatcccgctgcaccagttatttaagttggcgaccattaaagaactgtcggcgttcatcgaggccaatggcctaccccaggaaattaaacacacgccggcggttcggaccacatccgaagatccaattgccatagtatccatggcttgccggttacccggtggtgtgaataccccacagagactatgggaattattacgtgaagggggagaaaccctcagtggcttccctaccgaccgagggtgggacctcgcgaggttgcatcacccagacccagacaaccccggtacgtcatacgttgataaagggggattcctggacgatgcggcagggtttgacgcagaatttttcggtgtgagccccagagaagcagcggctatggacccgcagcagagattactcctcgaaaccagctgggagttagtcgagaatgcagggattgatccacatagcctaagggggaccgccactggtgtcttcctcggcgttgccaagtttgggtatggcgaggatacggcagctgccgaagacgtcgaggggtactctgtcactggtgtagccccggcagtggcgtcgggcagaattagttacacgatggggttggaagggccgtctatttcggttgataccgcctgttcctccagtctggttgcactccaccttgcagtcgagtcgctccggaaaggagaaagcagtatggccgtggtcgggggagcggcggtgatggccacaccgggtgtgtttgtggatttttcccgacagagagccttggccgcggatgggcgttcaaaggcgttcggagcaggtgcagacgggtttggatttagcgaaggtgtgacactggttctcctagaaagattaagtgaagcccggcgtaacggccatgaggtgctggcagttgttagaggttccgcattaaaccaggacggggcttcgaacgggctgagcgccccctcgggcccggcacagagaagagtgatacgccaagcactcgaatcgtgtggcctagaaccaggtgacgttgacgcggtggaagcgcacgggacaggaactgcgttaggggacccgatagaagcaaacgccttgctggacacttatggtagagatcgtgatgcggatcgacccctctggttaggaagtgttaagtcaaatataggacacactcaggcagcggcgggagtaactgggctgctcaaagtagtcctagccttacgcaatggggaactacccgccaccctacatgtcgaggaaccgacaccgcatgtggattggtcgagcgggggagttgctctcttggcgggtaatcagccgtggcgaagaggtgaacgaacccgtagagccgccgtgtccgcattcgggatcagtggtacgaacgcgcacgtgattgtggaagaagctccacaagaggtgagaccagcgcccggtcaaggactctcgcccgcggtgtcaaccttggtagtggcgggtaaaactatgcagcgtgtttcggcaaccgccggtatgctcgcagattggatggaaggcccaggtgcagatgtggcgctggcggacgtggcgcacacgttaaatcatcaccgttcacggcaaccaaagttcggtacggtggtggccagggaccggacacaggcaatcgccggactaagagcgctggcggcgggtcagcacgccccaggggttgttaaccctgctgaaggaagtccaggtccagggacggtgttcgtgtttcctggccaggggtcccagcgtgcaggcatgggggaggagttggctgcggctttccccgtgtttgccagaatccaccagcaagtgtgggatttactcgatgttcctgatctcgacgttaacgaaacggggtacgcacaaccagcactcttcgcactccaagtggcgctgtttgggctcctcgaatcatggggagtacggccggatgccgtggtcgggcatagtgtaggggaattagcggcagggtacgtttccgggctttggagtcttgaggatgcttgcacgctcgtgtcggcgagagcccgtctaatgcaagccttaccggcaggtggtgttatggcggcagttccagtgtccgaagacgaagcacgggctgtgttgggggaaggagtcgaaatagctgcggtcaacggtccgtcgagcgtggttctaagcggtgatgaagcagcagtgctccaggccgcggaagggttaggcaagtggacgcgattaccgacctcgcatgcattccattctgctcgtatggaaccaatgctggaagagtttagagcagtggcggaaggtctaacatacaggactccccaggtggcaatggccgccggagaccaggttatgaccgctgaatactgggtgcgtcaggttagggatacagttcgttttggcgagcaagttgcctcgttcgaggatgctgtattcgtggaattgggagcagatcgctctcttgcacggctagtcgatggtatcgcgatgttgcacggggatcatgaggcacaggctggtatgcggagagaacaacccttgcccttaggtttacgaagattgctaaccgacctgcataacgctggtgctgccgtcgattttagtgttttgtgcccacaaggtcgtctggttgacgcaccgttaccagcctggtcacaccggtttctcttctatgaccgggaaggagtggacaatagatcaccagggggaagcacagtggcggtccacccgcttttactagccgcggtggatgtgccgggccacggtggagcggttttcacgggtagactctcgactgacgagcaaccgtggttagcggagcacgttgtcgggggaagaaccctagttcctggttctgttttagtcgatctagccttagcggcaggcgaagacgtagggctaccggtgttagaagaattagtattgcagaggccgctggtgcttgccggcgcgggagcactcctacggatgtcggtcggggcaccagacgagagcggtagaagaactatcgatgttcacgcagctgaagacgtcgccgatttagcagatgcccaatggtcccagcacgccaccgggactttagcccaaggggtagcggcggggcccagggacacagagcaatggcccccagaggatgccgtccggattccattagacgaccattatgatggtctcgcggaacagggttatgagtacggtccgtcgtttcaggcgctagtggcctacgtggcggaggatgcgactgcgacaatgttagcggaagtcgcgcttccgggcagcattagatcgcaacaaggtctatacgccatccatcccgcactgctggacgcttgttttcaatctgtcggagcccacccagacagtcaatccgtcgggtcaggtctactcgtacccctcggtgttcggagagttcgtgcgtacgcacccgtaaggaccgcccgttattgttacacccgcgtcacgaaagttgaactagctggggttgaggccgacatcgacgttctggatgctcacggcacagtgcttctagccgtgtgcggtcttcgtatcgggaccggagtgagcgagagggacaaacacaacagagttctcaatgagcgcctactcaccatcgaatggcatcagcgtgaactaccagaaatggacccctcgggtgccgggaagtggctcctaatctcggactgtgcagcatccgatgtcaccgctacacgactggctgatgccttccgggagcacagcgctgcgtgcactaccatgcggtggccacttcacgatgatcaactagcagccgccgaccaactccgggaccaggtgggttcagatgagttttctggcgtggtagtactaacagggccaaacacagggacccctcatcagggttccgcagaccgtggcgccgagtacgttaggcggttagttggaatcgctcgtgaacttagcgatcttcccggagcggttccccgtatgtatgtcgtcacaaggggagcgcagagagtccttgccgatgattgtgttaatttagaacagggagggctcagaggtctgctgaggaccatcggtgctgagcacccacatctccgcgccacccaaattgatgttgatgagcagacaggagtagagcagctggcgcgacaactcctagctacatcggaggaagacgagacagcctggagggacaacgaatggtacgttgcgaggttatgccccacacccctgaggccacaggaacgtaggacaatagtggcggaccatcaacagtctggtatgcggttacaaatacgtacgcccggtgcaatcgatagtgtggcctttgaacccgcacccgatgtagagcaacccttacgggcgggtgaagttcgggttgacgttagagcaaccggtgttaatttccgtgacgttctactcgctctcgggatgtatccccagaaagctgacatggggacagaagcagctggtgttgtaacagcagtgggacctgatgtcgatgcgtttgcgcctggtgatagagttctagggctattccaaggggcatttgctccaattgcggtgactgaccatcgtttactggcacgggtgccagacgggtggtcagatgccgatgcggcggcggtgccaatagcttacacgacagcacattatgcgctgcacgacctggcggggttgcgggcggggcaatctgtcctgatacacgcggcagcgggtggtgttggtatggccgctgttgcactggcacggagggccggcgcagaagttctggctaccgcaggacctgcaaaacacggtacgctacgggcattagggctagatgatgaacacatcgcttcgagtcgggagaccgggttcgcgcgtaagttccgagagcggactgggggacgaggagtggacgtcgttctaaacagcttgaccggcgaactattagacgagtccgcggatctcctcgcggaggacggagtcttcgtggaaatgggaaagactgatctgcgcgatgcaggggactttcgtgggcgctacgccccgtttgatctaggggaagcaggcgatgacaggctcggggaaattctacgtgaggtggtgggactgctcggtgcaggggaactcgaccgactccctgttagcgcgtgggaattggggataccccagacggggaagtcgttagtgacgctgccacccgaacaagcgcaagttttcagaccagacggcactgtattgatcaccgggggaacgggaacgttaggtcggctgctggcccgtcatctggttacagagcacggggtgcgtcacctgctgctagtgtcgaggagaggagcagatgcccctggatcggacgagctgagggccgaaatcgaggatctcggagcatcagcggaaattgcagcatgtgatacagccgatcgagacgctctcagcgcgttgctagatggactgccgaggccactgaccggagtagttcacgccgcgggagtcctcgctgacggtctggttacatccatcgacgagcccgcagtcgaacaagttctccgtgcaaaagttgatgcggcctggaacctgcacgagctaactgcgaacaccggtctcagctttttcgtgctgttctcgtcagccgcaagtgtgttagcggggccggggcagggagtatatgcggcagcgaacgaatctttaaacgctctggccgctctgcgtaggactaggggtttacccgcaaaagcattgggatggggattatgggcgatagggcgtgcaatagcatttgccgagcagaccggtgacgcaatcgccccggaggaaggcgcgtacgccttcgagacactactcagacataacagggcgtactcgggttacgctcccgtgatagggtcaccatggctgactgcgttcgcccaacattcgccctttgcggagaagttccagtccctggggcaaaatagatccgggacgtctaagtttctggcagaattagtcgatctgccaagagaagaatggccagatcggttacgtcgtctattagaactggtgaggtctcatgctgccgcagtttcggggtatggatcggcagaccaattaccagaaagaaaagcattcaaagacctcggattcgattcactggcagcagtcgaactaagaaatcgtctagggaccgcgacaggcgtccggctgcccagtactctggtgttcgaccacccaaccccacttgcggttgcggaacatctacgtgatcgtctacctggaattggggcgctagttcccgctcccgtggtaatcgcagcaggccgtacggaggaaccaattgccatcgtttcgatggcatgtcgtttaccgggaggagtcaatacgccccaacggctctgggaattactacgggagggtggtgaaaccttgtccgggttcccaacggaccgtggctgggacctagcacggcttcaccaccctgatccggacaaccccggaacgagctacgttgataagggtggatttctcgacgacgcggcgggtttcgacgcagagtttttcggggtttcaccaagggaagctgccgctatggaccctcagcaacgattacttttagagacctcgtgggagctagttgaaaatgcgggcatagatccacatagcctgcgagggacagcgacaggggtgttcctaggagttgcgaagtttggttatggtgaggacacagcagcagcggaagatgttgaaggttattcagttaccggtgttgctcccgctgtggcatctggccgcatatcctacactatgggtttagaaggtccttccatctcggtcgataccgcatgctcaagctcgctagtcgcgcttcatctagccgtagagtccctccgaaagggtgagtcatctatggcggtggtgggtggtgcagccgttatggcgactcctggggtatttgttgatttttcacgccaacgggcgcttgccgcagacggccgttccaaagcgttcggggcaggtgcagatggttttggtttcagcgagggagtcacgctggttctactagagcgtttaagtgaggcgcgtcgtaacggtcatgaagttctagctgtagtgcgcgggtccgcgttaaaccaggacggagcgagcaacggactttcagcaccctccggccctgcgcaacgtagagtaataaggcaagcgctcgaatcgtgtgggcttgaaccgggggatgttgacgcggttgaggcgcatggtactggtacagcactaggtgacccaatagaggccaatgcgctgttggacacttacgggcgagaccgtgatgcggatcgtccactttggttggggtccgttaagagcaatattgggcacactcaagctgcggccggggttacaggactgctgaaggttgtgttagcactgcgcaatggtgagctacctgcaacgttacatgtcgaggaaccaactccacacgtcgattggtcctcaggtggtgtcgcattactggcgggtaatcaaccatggcgaaggggagaaaggaccagaagggcggcagtgagcgcctttggtatctccggtacaaatgctcacgtgatagtggaagaggcgcctcaggaagttcgacccgcccctggccaagggctgtcgccagccgtgtccacgttagttgttgcaggtaaaaccatgcagcgtgtaagtgcgacagctggaatgcttgcagactggatggagggtcctggggccgatgttgcattggcggatgtggcccataccctgaaccatcaccgatcaagacagcccaagttcgggacggttgtagcgcgtgacaggactcaggcgatagctgggctccgtgcattggcggctggtcaacatgctcctggggtcgtcaacccagctgaaggttccccaggaccaggcaccgtgttcgtttttcccggtcaaggttcgcagagggcagggatgggggaggaactcgcggcagcctttcctgtcttcgctcgaatacatcagcaagtttgggacctcctagatgttcccgacctcgacgttaatgaaaccgggtacgcccaaccagcgctgttcgcgcttcaggtcgcgctctttggccttctggagtcgtggggtgttaggccagatgcagtggtagggcactcagttggtgagctggccgcggggtacgtgtccggtctttggtcactagaggacgcctgcacactagtctcagcaagagcgcgcctaatgcaggcactgcctgctggaggggtgatggcggcagtccccgtctccgaggatgaggcgcgggccgtcctgggcgagggagttgaaattgcggctgtgaatggaccctcgtccgttgtgctctcaggggacgaggcggcagtcttacaggccgccgaaggtctaggtaagtggacgcgactgccgaccagccatgcttttcactcagcgagaatggaacccatgctagaagagtttcgggccgtagcagagggtctgacctatcgtacccctcaagtagctatggctgctggggatcaggtgatgacagcagaatattgggtgcggcaggttcgggacacagttcgcttcggggagcaagtagcgtcattcgaggatgcggtgtttgttgagttaggcgctgacagaagtctagcgcgtttggtggacggcatcgccatgctgcacggtgaccacgaagcgcaggccgcggaccataggcaaatcaccgaagcggttgcggatgcttacgtcttaggccaccttccggattttgcggcgctgcggcggcctcacgcacgaaagttggacttaccaacttatcccttcgagcgtagacagtactggttcagagatgcgcgtgagaggccggaacaacccagagataccggcggacctcgcacagaagcagtccgtctgttagaggatggtaggattgaagaattagctgcacttttgggaggggccagtgatgaccaacacacattacaggtgctgactaagttggcggcgcaacataaccaacaacgaacaacccggtcaatcgctgacgacaggtacgaaataaggtgggaccgatcgacttccccactatccggagcagatgttgaccaagcggggagctggatcgtggtgtcagatgacgcagatgccgttcccccgctagtggacttgctggctgcacgtaacgagccccatcaggttgttggtctacccgcttcggacgcagacgaggagaggctcgcagagactctgcgtgcggctgcgactgaagatgctacccttcggatagtccacgttgcggcgctcgaagcaggcgctacccccagcatgcgttcactgctccgcatgcagcaccgaatactaggtggcacgcggcgggtgttcagggcagcggtcgcagcggagttaagaggtcccatttggatagtgacgcggggagcacaaagagtggctgacaccgatacagttgccccgcatcagtcatgcctctggggatttgggagggcagcatcgctggagctgccgcacgtttggggtggcctagcagatttatcagagggcggtgacaatgcggccgatgagtggagtgcgctagtggaccgcattgccgcaccccacggttcagcagttagggaggaccaactggcgctgagagacagggccgtatatacgccaagactggccagacgttctgcgcccccgagcgggactcccctacatctacgaggggatggcacagtgttaataacaggtgggactggtacactaggtaggctattagcgcgtcacctagtaacagagcatggggtgcggcatctcttactagtttcaaggagaggcgccgatgcccctggctcggatgaactgcgcgcagaaatagaggacttaggtgccagcgcggagatcgcagcgtgtgatacagcggatcgcgatgccctatctgccctactagatggtctcccccggccccttacgggtgtcgttcacgccgctggcgtgttagccgatggacttgtcactagcattgacgagcctgcggtggaacaggttctccgagcaaaggtggacgcggcatggaacctacacgaactcacagctaataccgggctatcctttttcgttcttttctcatcagcagcatcggtcctggcaggtccagggcaaggagtttatgcggctgcaaatgaatcgctcaacgcactagctgcgttaaggcgaactaggggtctgccggccaaggctctgggatggggcctgtgggccatcgggcgggcaatcgcttttgcggagcagaccggggacgccatcgctccagaggaaggagcatacgcttttgaaactctgttaaggcataaccgtgcctactcgggatatgcgcccgtcattggatctccctggttgaccgcgttcgcacagcattccccctttgcagaaaaattccaatcactcggacagaatcggtcagggacatcgaaattcttagcggagctagttgacctgcctcgtgaggaatggccggataggctcaggagactactagagttagttaggtcccatgccgccgcggtctccggttacggtagtgcagatcaactgccggaaagaaaagcgttcaaggatttggggtttgattcgctggccgccgttgaactgcgtaaccggctgggaacggctacaggggtacgactgccgtcaaccctagtatttgatcacccaactccgctggccgtcgctgagcacttaagagataggctaacatccggggaagataaccctatccccctatgtcaaggcgatggggaggagatgagcacatggctacgtcgttttggacccccagtcgaacatcgggccaggctagtgtgtttcccccacgcaggcgcagcggcggattcatacttagacctagcaagagcgttagcaccagagatcgatgttcatgctgttcaataccccggcaggcaagacagaagggacgaggagccattaggaaccgcaggtgaaattgcagatgaagtggcagcggtgctacgtgcgtcgggaggggatgggccttttgcacttttcggccacagtatgggcgccctcatcgcgtacgagacagcaaggcgattagagagggaaccgggagggggacccttacgtttattcgtgagcggacaaacagcgccacgtgtccatgaacgaagaactgatctgcccggtgacgatggactcgtggacgagcttaggcgacttggcacctccgaggcagcgctcgcagacgaagccctgctggctatgtctctcccggtgctcagggcggattatagggtgttaagatcctacgcttgggcggatggtcccccactacgcgccggtataactgccctctgcggtgatgcagacccactaactgcaacaggggatgcggaacgctggttacaacattccgtgattccgggtcggacacggacatttcccggtgggcatttttatttaggggaacaagtgaccgaggtggcaggggctgtccgtagagatttactgagagcagggttagcgggttga

SEQ ID NO: 8 - DNA, 13590 bp, Artificial Sequence
  IHS
atggttgccaaacatagtctggaaaacggtgtctttcacaagatgactgaaaacgagaaggaattgatccttcatttcaacaacactaagacagattaccctaagaacaagacgttgcatgaactttttgaagagcaggcaatgaaaaccccggatcacacagcactggtgttcggcgctcagagaatgacctacagggaactgaacgagaaggcgaatcaaacggcccgtctgttacgcgaaaaagggatcggacgtggcagcattgcggccattatcgcagatcgctcttttgaaatgatcatcggaatcatcggcatcctaaaggcaggcggtgcttatctgccgattgacccagaaaccccgaaagatcgtatcgcgttcatgctgagcgataccaaggcagctgtattgcttacgcagggaaaagcggccgatggcattgactgcgaagcggatatcgtgcaactggaccgtgaagccagcgatggtttttctaaagagccgctgagctctgttaatgatagtggcgacaccgcgtatattatctacacgagtggttccaccgggaccccgaaaggtgtgattaccccgcattattccgttatccgcgtggttcagaacactaactacatcgatatcacagaagacaacgtaatcctccaactatcaaactactcgttcgacggtagtgtgtttgatattttcggtgcgctcctaaacggggcctccctggtgatgatcgagaaagaagcactgttaaacattaatcgtctgggctcagctatcaatgaagagaaagtgagcgtgatgtttattaccacggcgctgttcaacatgattgccgatatccatgttgactgcctctcaaacctgcgtaaaattctgtttggcggcgaacgagcttcgatcccacatgtccgcaaggtactgaaccacgtcggtcgcgataaattaattcacgtatatggcccgactgaatcaacagtgtacgccacctattacttcataaacgaaattgatgacgaggcggaaactatccccataggtagcccgctggccaataccagcgtgctgattatggacgaagcaggcaaactggtcccaattggagtacctggcgaactgtgtatcgctggtgatgggttgtctaaaggttatcttaaccgtgaagagctcaccgcggaaaaatttatcccgcatccattcattcccggtgaacgtctgtacaagacgggcgaccttgccaaatggctcccagatggaaatatcgaatttataggccgcattgatcatcaggttaaaatccgtggctttcgaattgaactgggggagatcgaaagccgtttagaaatgcacgaggacatcaacgaaaccattgtgacggttcgcgaggatgaagagagccggccgtatatctgtgcatacattaccgctaatcgtgaaatttctcttgatgagctcaagggttttctgggggaaaaattacccgagtatatgatcccggcgtacttcgttaagctggataaactgccgttaacgaagaatggtaaagtcgaccggaaagccctgcctgaacccgatcgtactgcgggcgccgagaacgaatatgaggcaccgcgcaatgaaacagaagagaaactggcagctgtctggcaggacgtgttacatgttgaaaaagcaggcattcatgatcactttgctcaaatgggcggtcattcattgcacgcaatggaacttatcgctaagatcaaggaaaagatgaacgttgagatcccgctgcaccagttatttaagttggcgaccattaaagaactgtcggcgttcatcgaggccaatggcctaccccaggaaattaaacacacgccggcggttcggaccacatccgaagatccaattgccatagtatccatggcttgccggttacccggtggtgtgaataccccacagagactatgggaattattacgtgaagggggagaaaccctcagtggcttccctaccgaccgagggtgggacctcgcgaggttgcatcacccagacccagacaaccccggtacgtcatacgttgataaagggggattcctggacgatgcggcagggtttgacgcagaatttttcggtgtgagccccagagaagcagcggctatggacccgcagcagagattactcctcgaaaccagctgggagttagtcgagaatgcagggattgatccacatagcctaagggggaccgccactggtgtcttcctcggcgttgccaagtttgggtatggcgaggatacggcagctgccgaagacgtcgaggggtactctgtcactggtgtagccccggcagtggcgtcgggcagaattagttacacgatggggttggaagggccgtctatttcggttgataccgcctgttcctccagtctggttgcactccaccttgcagtcgagtcgctccggaaaggagaaagcagtatggccgtggtcgggggagcggcggtgatggccacaccgggtgtgtttgtggatttttcccgacagagagccttggccgcggatgggcgttcaaaggcgttcggagcaggtgcagacgggtttggatttagcgaaggtgtgacactggttctcctagaaagattaagtgaagcccggcgtaacggccatgaggtgctggcagttgttagaggttccgcattaaaccaggacggggcttcgaacgggctgagcgccccctcgggcccggcacagagaagagtgatacgccaagcactcgaatcgtgtggcctagaaccaggtgacgttgacgcggtggaagcgcacgggacaggaactgcgttaggggacccgatagaagcaaacgccttgctggacacttatggtagagatcgtgatgcggatcgacccctctggttaggaagtgttaagtcaaatataggacacactcaggcagcggcgggagtaactgggctgctcaaagtagtcctagccttacgcaatggggaactacccgccaccctacatgtcgaggaaccgacaccgcatgtggattggtcgagcgggggagttgctctcttggcgggtaatcagccgtggcgaagaggtgaacgaacccgtagagccgccgtgtccgcattcgggatcagtggtacgaacgcgcacgtgattgtggaagaagctccacaagaggtgagaccagcgcccggtcaaggactctcgcccgcggtgtcaaccttggtagtggcgggtaaaactatgcagcgtgtttcggcaaccgccggtatgctcgcagattggatggaaggcccaggtgcagatgtggcgctggcggacgtggcgcacacgttaaatcatcaccgttcacggcaaccaaagttcggtacggtggtggccagggaccggacacaggcaatcgccggactaagagcgctggcggcgggtcagcacgccccaggggttgttaaccctgctgaaggaagtccaggtccagggacggtgttcgtgtttcctggccaggggtcccagcgtgcaggcatgggggaggagttggctgcggctttccccgtgtttgccagaatccaccagcaagtgtgggatttactcgatgttcctgatctcgacgttaacgaaacggggtacgcacaaccagcactcttcgcactccaagtggcgctgtttgggctcctcgaatcatggggagtacggccggatgccgtggtcgggcatagtgtaggggaattagcggcagggtacgtttccgggctttggagtcttgaggatgcttgcacgctcgtgtcggcgagagcccgtctaatgcaagccttaccggcaggtggtgttatggcggcagttccagtgtccgaagacgaagcacgggctgtgttgggggaaggagtcgaaatagctgcggtcaacggtccgtcgagcgtggttctaagcggtgatgaagcagcagtgctccaggccgcggaagggttaggcaagtggacgcgattaccgacctcgcatgcattccattctgctcgtatggaaccaatgctggaagagtttagagcagtggcggaaggtctaacatacaggactccccaggtggcaatggccgccggagaccaggttatgaccgctgaatactgggtgcgtcaggttagggatacagttcgttttggcgagcaagttgcctcgttcgaggatgctgtattcgtggaattgggagcagatcgctctcttgcacggctagtcgatggtatcgcgatgttgcacggggatcatgaggcacaggctggtatgcggagagaacaacccttgcccttaggtttacgaagattgctaaccgacctgcataacgctggtgctgccgtcgattttagtgttttgtgcccacaaggtcgtctggttgacgcaccgttaccagcctggtcacaccggtttctcttctatgaccgggaaggagtggacaatagatcaccagggggaagcacagtggcggtccacccgcttttactagccgcggtggatgtgccgggccacggtggagcggttttcacgggtagactctcgactgacgagcaaccgtggttagcggagcacgttgtcgggggaagaaccctagttcctggttctgttttagtcgatctagccttagcggcaggcgaagacgtagggctaccggtgttagaagaattagtattgcagaggccgctggtgcttgccggcgcgggagcactcctacggatgtcggtcggggcaccagacgagagcggtagaagaactatcgatgttcacgcagctgaagacgtcgccgatttagcagatgcccaatggtcccagcacgccaccgggactttagcccaaggggtagcggcggggcccagggacacagagcaatggcccccagaggatgccgtccggattccattagacgaccattatgatggtctcgcggaacagggttatgagtacggtccgtcgtttcaggcgctagtggcctacgtggcggaggatgcgactgcgacaatgttagcggaagtcgcgcttccgggcagcattagatcgcaacaaggtctatacgccatccatcccgcactgctggacgcttgttttcaatctgtcggagcccacccagacagtcaatccgtcgggtcaggtctactcgtacccctcggtgttcggagagttcgtgcgtacgcacccgtaaggaccgcccgttattgttacacccgcgtcacgaaagttgaactagctggggttgaggccgacatcgacgttctggatgctcacggcacagtgcttctagccgtgtgcggtcttcgtatcgggaccggagtgagcgagagggacaaacacaacagagttctcaatgagcgcctactcaccatcgaatggcatcagcgtgaactaccagaaatggacccctcgggtgccgggaagtggctcctaatctcggactgtgcagcatccgatgtcaccgctacacgactggctgatgccttccgggagcacagcgctgcgtgcactaccatgcggtggccacttcacgatgatcaactagcagccgccgaccaactccgggaccaggtgggttcagatgagttttctggcgtggtagtactaacagggccaaacacagggacccctcatcagggttccgcagaccgtggcgccgagtacgttaggcggttagttggaatcgctcgtgaacttagcgatcttcccggagcggttccccgtatgtatgtcgtcacaaggggagcgcagagagtccttgccgatgattgtgttaatttagaacagggagggctcagaggtctgctgaggaccatcggtgctgagcacccacatctccgcgccacccaaattgatgttgatgagcagacaggagtagagcagctggcgcgacaactcctagctacatcggaggaagacgagacagcctggagggacaacgaatggtacgttgcgaggttatgccccacacccctgaggccacaggaacgtaggacaatagtggcggaccatcaacagtctggtatgcggttacaaatacgtacgcccggtgcaatcgatagtgtggcctttgaacccgcacccgatgtagagcaacccttacgggcgggtgaagttcgggttgacgttagagcaaccggtgttaatttccgtgacgttctactcgctctcgggatgtatccccagaaagctgacatggggacagaagcagctggtgttgtaacagcagtgggacctgatgtcgatgcgtttgcgcctggtgatagagttctagggctattccaaggggcatttgctccaattgcggtgactgaccatcgtttactggcacgggtgccagacgggtggtcagatgccgatgcggcggcggtgccaatagcttacacgacagcacattatgcgctgcacgacctggcggggttgcgggcggggcaatctgtcctgatacacgcggcagcgggtggtgttggtatggccgctgttgcactggcacggagggccggcgcagaagttctggctaccgcaggacctgcaaaacacggtacgctacgggcattagggctagatgatgaacacatcgcttcgagtcgggagaccgggttcgcgcgtaagttccgagagcggactgggggacgaggagtggacgtcgttctaaacagcttgaccggcgaactattagacgagtccgcggatctcctcgcggaggacggagtcttcgtggaaatgggaaagactgatctgcgcgatgcaggggactttcgtgggcgctacgccccgtttgatctaggggaagcaggcgatgacaggctcggggaaattctacgtgaggtggtgggactgctcggtgcaggggaactcgaccgactccctgttagcgcgtgggaattggggataccccagacggggaagtcgttagtgacgctgccacccgaacaagcgcaagttttcagaccagacggcactgtattgatcaccgggggaacgggaacgttaggtcggctgctggcccgtcatctggttacagagcacggggtgcgtcacctgctgctagtgtcgaggagaggagcagatgcccctggatcggacgagctgagggccgaaatcgaggatctcggagcatcagcggaaattgcagcatgtgatacagccgatcgagacgctctcagcgcgttgctagatggactgccgaggccactgaccggagtagttcacgccgcgggagtcctcgctgacggtctggttacatccatcgacgagcccgcagtcgaacaagttctccgtgcaaaagttgatgcggcctggaacctgcacgagctaactgcgaacaccggtctcagctttttcgtgctgttctcgtcagccgcaagtgtgttagcggggccggggcagggagtatatgcggcagcgaacgaatctttaaacgctctggccgctctgcgtaggactaggggtttacccgcaaaagcattgggatggggattatgggcgatagggcgtgcaatagcatttgccgagcagaccggtgacgcaatcgccccggaggaaggcgcgtacgccttcgagacactactcagacataacagggcgtactcgggttacgctcccgtgatagggtcaccatggctgactgcgttcgcccaacattcgccctttgcggagaagttccagtccctggggcaaaatagatccgggacgtctaagtttctggcagaattagtcgatctgccaagagaagaatggccagatcggttacgtcgtctattagaactggtgaggtctcatgctgccgcagtttcggggtatggatcggcagaccaattaccagaaagaaaagcattcaaagacctcggattcgattcactggcagcagtcgaactaagaaatcgtctagggaccgcgacaggcgtccggctgcccagtactctggtgttcgaccacccaaccccacttgcggttgcggaacatctacgtgatcgtctactgccagtagaacagccttttgtgcactcaccggaagagcggtatcgaccattcgcgttaacggatgttcagcaagcctacctggtcgggcgccagccgggatttgccctgggcggtgtaggctcgcatttcttcgtggaattcgagatcgcagatctcgacatacaccgcctggaaaaagtgtggaaccgtttaattgcacgtcatgatatgttgcgcgctgtggttcgtgacggtcagcaacgtgtactggaacagaccccgccatgggtcataccagcacatattcttcacagtcctgaagaggcattacaggttcgtgatcgtttagctcaccaagtgttgaaccccgaagtctggccggtatttgatctgcaggtgggcttcgttgacggtatgccggcccgtttatggttgtgccttgataacctgttattggacgggctgagcatgcagattcttctctctgaactggagcatggatatcgctacccacagcaactccctcccccgttgccgatcacttttcgcgattatcttcagcaaccggcactccgtaccccaaatcctgactcattggcttggtggcagacgcaactggatgacatcccacctgcgcccgccctcccgctacgttgtctgcctcaagatgttgaaaccccgcgtttcgcgcgtctgtacggcgcaatggattctgctcgttggcgtcgcctgaaacagcgtgcggccgacgcacatctgactccgtcagctgtcctactgagcgtatggtctacagtgctggcagcttggtcggcgcagccggattttactctcaacctgacattattcgaccggcgaccactgcaccctcagattaatcaaatccttggcgattttacctcactgatgttattgtcgtggcatccgggtgagagttggctgcagtccgcgcgtcttctccagcaacgcctttcagaatcgctcaaccaccgtgatgttagcgccattcgcgtcatgcggcagctggcgagaaggcaaaatgtcccggccgtacccatgccggtcgtatttacctctgcgctggggtttgaacaggataacttcctggcccgtcgcaatctactgaaaccggtgtggggtatcagtcagacgccgcaagtttggctggaccatcaggtctatgaatccgagggcgaactgcgttttaactgggatttcgttgcggccctgtttccggacggtcaagtggaacgtcagttcgcgcaatactgcgccttattgaatcgcatggcagaagatgacagctcttggcagttgccgcttgctgatctggtgcccccgttaaaagtgaccgagcggcgagcgagaaggctgcgtccagaacgcgcccagcctcgtattgcagctgataagagttccgttagtctgatctgtgacacttttcgtgaggtggttggggaacccgtggcaccggctgagaactttttcgaagcgggagccacatccctcaatctggttcagctgcatgtccttctccaacgtcacgaatttgcgaccttaacgctactggatttgttcacccatccaagccctgttgcattggctaactatcttgcgggtgtggccctggaagagaaaacgaagcgcgtgcggccggttcggcgaagacagcgtcgcattcagcacttgcccttagtagctgcgcaacctggaatatggatggccgagaagttatctgaactaccatcagcgtggagcgtagcgcattacgtggagctcactggtgaggttgactcgcctcttttggccagggcggtagtggctggccttgcacaagctgacaccttaagaatgcgtttcacagaggataatggggaagtttggcaatgggtagacgatgcgttaacatttgagttaccggaaatcatagacctgcgcactaacatagaccctcacgggacagctcaggccttgatgcaagcggacctgcaacaggacctacgtgtggattcggggaagcctctggtcttccatcagctaattcaagtagcggacaatcgctggtactggtatcaaaggtaccaccacttgcttgtggacgggttcagttttccagcgataaccaggcaaatagccaacatttattgcacttggttgcgaggagagcctacgcccgcatcccccttcacgccattcgcagacgttgttgaggaataccaacagtatcgcgagagcgaagcgtggcaacgcgatgcggcattctgggcggagcaacgacggcaactaccgcctcccgcatccctatcacctgccccgctccccggccggtccgcgtcagccgacattctacggctaaagctggagttcacagatggtgaatttcgacagcttgctacacaactcagcggggtacaaaggacagacctagcgctcgctctggctgcattatggctaggacgactttgcaatcgaatggactacgcggcgggtttcatatttatgcgccggctcggcagcgcagcgttgaccgcaacgggtccagttttaaatgttcttcctttgggaatccacataggcaacccaagcttctctgagcttctcaccagggttcgcgaggtcgccttaggcgcgtatgcacaccaacatattccttttgagatgttagtagaggcactgcaaccagagcgaaaccttagccatactcctctcttccaagtgatgtttgtccttcagaatgcgcccgcgtcccaattagagttaaccgggatcaccgcaaacccaattaaggttaaatcaactaccacgaagttcgacctaactttaatcatgcaaaacacagctagcggattagtaggtgtttgggagtacaacacggatttattcgacgcgtcaacgattgagcgaatgacagggcactttgtaaccctcctcgagggcgttatcgccaatccacaacagccgatctctcaacttcctattttaactacagtggagcaacagcaacttttagtcgagtggaataacacgcaaaccgactaccccgctgataagtgtatacatcaattattcgaggaacaggtcgagcgcacaccagacgccgttgctgtcgtctttgggaatcagcaactcagctatcgagagatgcgcgaacaagtggttgcactcgccaatttattacgtgagcggggagtcaagccaggagactccgttgccgtggccttaccacgctctgttttcttaacccttgcactacacgcgattgtcgaggcaggtgccgcctggctacctcttgacacaggatatcctgacgatagattaaaaatgatgctcgaggatgcacggccttcccttctgatcacaacagacgatcaattaccccgcttcagtgacgtacctaatctgacctcactctgttacaacgctcccttgacgcctcaagggagcgcccctttacagctgtctcaacctcaccatactgcatatatcatctttacaagtggttctacgggacgccccaagggagtaatggttggtcagactgcgattgtaaatcgtctgttgtggatgcaaaaccactaccctttgacgggggaggacgttgtagcccaaaagactccttgctcgttcgatgtctcagtctgggagttcttttggccatttatagcaggggccaaattagttatggcggagccggaagcccaccgagacccacttgcgatgcagcaattctttgctgagtatggtgtcaccactacacatttcgtcccatcgatgttagcggccttcgtggcttctcttactccacaaacggctaggcaatcttgtgccacactaaagcaagtcttctgctccggcgaggcattacctgcagacttgtgccgggaatggcagcaactcacaggagctccattgcacaatctatacggaccgaccgaggccgcagtagacgtatcttggtatcctgcgtttggcgaggagttagcgcaagtaagaggttcgtcagtaccaataggataccccgtatggaacacggggcttcggatactggacgcgatgatgcatccggtcccaccaggagtcgcgggcgatttatacctgactgggatacagctggcccaaggttacctagggagacctgaccttacggcgtcgaggttcatagcggatccgtttgctccgggtgagcgcatgtaccgtacgggcgacgtcgcgcgatggctagataatggcgccgtagagtatcttggtagatcagacgatcagttaaagatacggggacaacgaatagagcttggggaaatagaccgggtaatgcaggctttgccagatgtcgagcaagcggtggcttcgtgtgctattgcgcgggaggacatacctgggaacaaacaccttgtagcgtacatagttcctcaagaggagcaaacatgcactgagcgatcgaggtccacacttacagtttcgttcgtccggagtttccttaaggagaaactccccgaatatatggtaccgagcgcaatagtgattctagacgctctccccctgactcctaatggaaagctagaccggcgggcgttacccgcccctgacctgcactcacaacttgagacaattattgctgcggctttctcgagcctgctcgggtgcgacgtacaagacgcggatgctgactttttcgcgctaggtggccattcgctgcttgccatgaagctagccgctcagctttcccgacaagtagcgcggcaggtgacaccaggccaagttatggtagcttcgactgtcgcaaagctcgcaacgatcatagacgcggagttagataaatacgtcgctccaaggaacccgataacatccggggaagataaccctatccccctatgtcaaggcgatggggaggagatgagcacatggctacgtcgttttggacccccagtcgaacatcgggccaggctagtgtgtttcccccacgcaggcgcagcggcggattcatacttagacctagcaagagcgttagcaccagagatcgatgttcatgctgttcaataccccggcaggcaagacagaagggacgaggagccattaggaaccgcaggtgaaattgcagatgaagtggcagcggtgctacgtgcgtcgggaggggatgggccttttgcacttttcggccacagtatgggcgccctcatcgcgtacgagacagcaaggcgattagagagggaaccgggagggggacccttacgtttattcgtgagcggacaaacagcgccacgtgtccatgaacgaagaactgatctgcccggtgacgatggactcgtggacgagcttaggcgacttggcacctccgaggcagcgctcgcagacgaagccctgctggctatgtctctcccggtgctcagggcggattatagggtgttaagatcctacgcttgggcggatggtcccccactacgcgccggtataactgccctctgcggtgatgcagacccactaactgcaacaggggatgcggaacgctggttacaacattccgtgattccgggtcggacacggacatttcccggtgggcatttttatttaggggaacaagtgaccgaggtggcaggggctgtccgtagagatttactgagagcagggttagcgggttga

SEQ ID NO: 9 - DNA, 11928 bp, Artificial Sequence
  IOC
atggttgccaaacatagtctggaaaacggtgtctttcacaagatgactgaaaacgagaaggaattgatccttcatttcaacaacactaagacagattaccctaagaacaagacgttgcatgaactttttgaagagcaggcaatgaaaaccccggatcacacagcactggtgttcggcgctcagagaatgacctacagggaactgaacgagaaggcgaatcaaacggcccgtctgttacgcgaaaaagggatcggacgtggcagcattgcggccattatcgcagatcgctcttttgaaatgatcatcggaatcatcggcatcctaaaggcaggcggtgcttatctgccgattgacccagaaaccccgaaagatcgtatcgcgttcatgctgagcgataccaaggcagctgtattgcttacgcagggaaaagcggccgatggcattgactgcgaagcggatatcgtgcaactggaccgtgaagccagcgatggtttttctaaagagccgctgagctctgttaatgatagtggcgacaccgcgtatattatctacacgagtggttccaccgggaccccgaaaggtgtgattaccccgcattattccgttatccgcgtggttcagaacactaactacatcgatatcacagaagacaacgtaatcctccaactatcaaactactcgttcgacggtagtgtgtttgatattttcggtgcgctcctaaacggggcctccctggtgatgatcgagaaagaagcactgttaaacattaatcgtctgggctcagctatcaatgaagagaaagtgagcgtgatgtttattaccacggcgctgttcaacatgattgccgatatccatgttgactgcctctcaaacctgcgtaaaattctgtttggcggcgaacgagcttcgatcccacatgtccgcaaggtactgaaccacgtcggtcgcgataaattaattcacgtatatggcccgactgaatcaacagtgtacgccacctattacttcataaacgaaattgatgacgaggcggaaactatccccataggtagcccgctggccaataccagcgtgctgattatggacgaagcaggcaaactggtcccaattggagtacctggcgaactgtgtatcgctggtgatgggttgtctaaaggttatcttaaccgtgaagagctcaccgcggaaaaatttatcccgcatccattcattcccggtgaacgtctgtacaagacgggcgaccttgccaaatggctcccagatggaaatatcgaatttataggccgcattgatcatcaggttaaaatccgtggctttcgaattgaactgggggagatcgaaagccgtttagaaatgcacgaggacatcaacgaaaccattgtgacggttcgcgaggatgaagagagccggccgtatatctgtgcatacattaccgctaatcgtgaaatttctcttgatgagctcaagggttttctgggggaaaaattacccgagtatatgatcccggcgtacttcgttaagctggataaactgccgttaacgaagaatggtaaagtcgaccggaaagccctgcctgaacccgatcgtactgcgggcgccgagaacgaatatgaggcaccgcgcaatgaaacagaagagaaactggcagctgtctggcaggacgtgttacatgttgaaaaagcaggcattcatgatcactttgctcaaatgggcggtcattcattgcacgcaatggaacttatcgctaagatcaaggaaaagatgaacgttgagatcccgctgcaccagttatttaagttggcgaccattaaagaactgtcggcgttcatcgaggccaatggcctaccccaggaaattaaacacacgccggcggttcggaccacatccgaagatccaattgccatcgtttcgatggcatgtcgtttaccgggaggagtcaatacgccccaacggctctgggaattactacgggagggtggtgaaaccttgtccgggttcccaacggaccgtggctgggacctagcacggcttcaccaccctgatccggacaaccccggaacgagctacgttgataagggtggatttctcgacgacgcggcgggtttcgacgcagagtttttcggggtttcaccaagggaagctgccgctatggaccctcagcaacgattacttttagagacctcgtgggagctagttgaaaatgcgggcatagatccacatagcctgcgagggacagcgacaggggtgttcctaggagttgcgaagtttggttatggtgaggacacagcagcagcggaagatgttgaaggttattcagttaccggtgttgctcccgctgtggcatctggccgcatatcctacactatgggtttagaaggtccttccatctcggtcgataccgcatgctcaagctcgctagtcgcgcttcatctagccgtagagtccctccgaaagggtgagtcatctatggcggtggtgggtggtgcagccgttatggcgactcctggggtatttgttgatttttcacgccaacgggcgcttgccgcagacggccgttccaaagcgttcggggcaggtgcagatggttttggtttcagcgagggagtcacgctggttctactagagcgtttaagtgaggcgcgtcgtaacggtcatgaagttctagctgtagtgcgcgggtccgcgttaaaccaggacggagcgagcaacggactttcagcaccctccggccctgcgcaacgtagagtaataaggcaagcgctcgaatcgtgtgggcttgaaccgggggatgttgacgcggttgaggcgcatggtactggtacagcactaggtgacccaatagaggccaatgcgctgttggacacttacgggcgagaccgtgatgcggatcgtccactttggttggggtccgttaagagcaatattgggcacactcaagctgcggccggggttacaggactgctgaaggttgtgttagcactgcgcaatggtgagctacctgcaacgttacatgtcgaggaaccaactccacacgtcgattggtcctcaggtggtgtcgcattactggcgggtaatcaaccatggcgaaggggagaaaggaccagaagggcggcagtgagcgcctttggtatctccggtacaaatgctcacgtgatagtggaagaggcgcctcaggaagttcgacccgcccctggccaagggctgtcgccagccgtgtccacgttagttgttgcaggtaaaaccatgcagcgtgtaagtgcgacagctggaatgcttgcagactggatggagggtcctggggccgatgttgcattggcggatgtggcccataccctgaaccatcaccgatcaagacagcccaagttcgggacggttgtagcgcgtgacaggactcaggcgatagctgggctccgtgcattggcggctggtcaacatgctcctggggtcgtcaacccagctgaaggttccccaggaccaggcaccgtgttcgtttttcccggtcaaggttcgcagagggcagggatgggggaggaactcgcggcagcctttcctgtcttcgctcgaatacatcagcaagtttgggacctcctagatgttcccgacctcgacgttaatgaaaccgggtacgcccaaccagcgctgttcgcgcttcaggtcgcgctctttggccttctggagtcgtggggtgttaggccagatgcagtggtagggcactcagttggtgagctggccgcggggtacgtgtccggtctttggtcactagaggacgcctgcacactagtctcagcaagagcgcgcctaatgcaggcactgcctgctggaggggtgatggcggcagtccccgtctccgaggatgaggcgcgggccgtcctgggcgagggagttgaaattgcggctgtgaatggaccctcgtccgttgtgctctcaggggacgaggcggcagtcttacaggccgccgaaggtctaggtaagtggacgcgactgccgaccagccatgcttttcactcagcgagaatggaacccatgctagaagagtttcgggccgtagcagagggtctgacctatcgtacccctcaagtagctatggctgctggggatcaggtgatgacagcagaatattgggtgcggcaggttcgggacacagttcgcttcggggagcaagtagcgtcattcgaggatgcggtgtttgttgagttaggcgctgacagaagtctagcgcgtttggtggacggcatcgccatgctgcacggtgaccacgaagcgcaggccgcggaccataggcaaatcaccgaagcggttgcggatgcttacgtcttaggccaccttccggattttgcggcgctgcggcggcctcacgcacgaaagttggacttaccaacttatcccttcgagcgtagacagtactggttcagagatgcgcgtgagaggccggaacaacccagagataccggcggacctcgcacagaagcagtccgtctgttagaggatggtaggattgaagaattagctgcacttttgggaggggccagtgatgaccaacacacattacaggtgctgactaagttggcggcgcaacataaccaacaacgaacaacccggtcaatcgctgacgacaggtacgaaataaggtgggaccgatcgacttccccactatccggagcagatgttgaccaagcggggagctggatcgtggtgtcagatgacgcagatgccgttcccccgctagtggacttgctggctgcacgtaacgagccccatcaggttgttggtctacccgcttcggacgcagacgaggagaggctcgcagagactctgcgtgcggctgcgactgaagatgctacccttcggatagtccacgttgcggcgctcgaagcaggcgctacccccagcatgcgttcactgctccgcatgcagcaccgaatactaggtggcacgcggcgggtgttcagggcagcggtcgcagcggagttaagaggtcccatttggatagtgacgcggggagcacaaagagtggctgacaccgatacagttgccccgcatcagtcatgcctctggggatttgggagggcagcatcgctggagctgccgcacgtttggggtggcctagcagatttatcagagggcggtgacaatgcggccgatgagtggagtgcgctagtggaccgcattgccgcaccccacggttcagcagttagggaggaccaactggcgctgagagacagggccgtatatacgccaagactggccagacgttctgcgcccccgagcgggactcccctacatctacgaggggatggcacagtgttaataacaggtgggactggtacactaggtaggctattagcgcgtcacctagtaacagagcatggggtgcggcatctcttactagtttcaaggagaggcgccgatgcccctggctcggatgaactgcgcgcagaaatagaggacttaggtgccagcgcggagatcgcagcgtgtgatacagcggatcgcgatgccctatctgccctactagatggtctcccccggccccttacgggtgtcgttcacgccgctggcgtgttagccgatggacttgtcactagcattgacgagcctgcggtggaacaggttctccgagcaaaggtggacgcggcatggaacctacacgaactcacagctaataccgggctatcctttttcgttcttttctcatcagcagcatcggtcctggcaggtccagggcaaggagtttatgcggctgcaaatgaatcgctcaacgcactagctgcgttaaggcgaactaggggtctgccggccaaggctctgggatggggcctgtgggccatcgggcgggcaatcgcttttgcggagcagaccggggacgccatcgctccagaggaaggagcatacgcttttgaaactctgttaaggcataaccgtgcctactcgggatatgcgcccgtcattggatctccctggttgaccgcgttcgcacagcattccccctttgcagaaaaattccaatcactcggacagaatcggtcagggacatcgaaattcttagcggagctagttgacctgcctcgtgaggaatggccggataggctcaggagactactagagttagttaggtcccatgccgccgcggtctccggttacggtagtgcagatcaactgccggaaagaaaagcgttcaaggatttggggtttgattcgctggccgccgttgaactgcgtaaccggctgggaacggctacaggggtacgactgccgtcaaccctagtatttgatcacccaactccgctggccgtcgctgagcacttaagagataggctactgccagtagaacagccttttgtgcactcaccggaagagcggtatcgaccattcgcgttaacggatgttcagcaagcctacctggtcgggcgccagccgggatttgccctgggcggtgtaggctcgcatttcttcgtggaattcgagatcgcagatctcgacatacaccgcctggaaaaagtgtggaaccgtttaattgcacgtcatgatatgttgcgcgctgtggttcgtgacggtcagcaacgtgtactggaacagaccccgccatgggtcataccagcacatattcttcacagtcctgaagaggcattacaggttcgtgatcgtttagctcaccaagtgttgaaccccgaagtctggccggtatttgatctgcaggtgggcttcgttgacggtatgccggcccgtttatggttgtgccttgataacctgttattggacgggctgagcatgcagattcttctctctgaactggagcatggatatcgctacccacagcaactccctcccccgttgccgatcacttttcgcgattatcttcagcaaccggcactccgtaccccaaatcctgactcattggcttggtggcagacgcaactggatgacatcccacctgcgcccgccctcccgctacgttgtctgcctcaagatgttgaaaccccgcgtttcgcgcgtctgtacggcgcaatggattctgctcgttggcgtcgcctgaaacagcgtgcggccgacgcacatctgactccgtcagctgtcctactgagcgtatggtctacagtgctggcagcttggtcggcgcagccggattttactctcaacctgacattattcgaccggcgaccactgcaccctcagattaatcaaatccttggcgattttacctcactgatgttattgtcgtggcatccgggtgagagttggctgcagtccgcgcgtcttctccagcaacgcctttcagaatcgctcaaccaccgtgatgttagcgccattcgcgtcatgcggcagctggcgagaaggcaaaatgtcccggccgtacccatgccggtcgtatttacctctgcgctggggtttgaacaggataacttcctggcccgtcgcaatctactgaaaccggtgtggggtatcagtcagacgccgcaagtttggctggaccatcaggtctatgaatccgagggcgaactgcgttttaactgggatttcgttgcggccctgtttccggacggtcaagtggaacgtcagttcgcgcaatactgcgccttattgaatcgcatggcagaagatgacagctcttggcagttgccgcttgctgatctggtgcccccgttaaaagtgaccgagcggcgagcgagaaggctgcgtccagaacgcgcccagcctcgtattgcagctgataagagttccgttagtctgatctgtgacacttttcgtgaggtggttggggaacccgtggcaccggctgagaactttttcgaagcgggagccacatccctcaatctggttcagctgcatgtccttctccaacgtcacgaatttgcgaccttaacgctactggatttgttcacccatccaagccctgttgcattggctaactatcttgcgggtgtggccctggaagagaaaacgaagcgcgtgcggccggttcggcgaagacagcgtcgcattggagagccgttcccactcgctcctatgcaacacgccatgtgggtagggcggcacgaccaccaacagctcgggggagtagcaggccatctttacgtcgagtttgacggcgcgagagtcgaccccgatcggttgcgcgctgccgccacccgactcgccctacgtcaccctatgttgagggtacagttcctgcctgacggtacacaaaggatccctccagccgcaggctcgcgggactttcccatcagcgttgcggatcttcgtcacgtagctcctgacgttgtcgatcaacggctcgcgggtattagagacgcaaagtctcatcaacagcttgatggagctgtcttcgagttggctctcactctcctgccaggtgaaaggacgaggctgcacgtcgacctggatatgcaagctgctgacgccatgagctacaggatcctgctggcggacttggccgcactatacgacgggagagagcccccagcactcggttacacgtatagagagtaccgccaggctattgaggccgaggaaacattaccgcaacctgttcgcgacgccgatagggactggtgggcacaaagaataccacagcttccagacccgcccgcactaccgacgcgtgccggtggtgagagagatcgccggcgctcgaccagaagatggcactggttagacccacaaacaagggacgccctcttcgcacgagcacgagctcgtggcatcacacctgcaatgacacttgcggccgcgtttgcaaatgtcctcgcgagatggtccgcctcttcccggttcttactcaatttgccccttttctcgcgccaagcgttgcatccggacgtagacctcttggtaggtgacttcacatcgtcgctgctgttagatgttgacctaggagatacagtgtctaatcttgctcggaagaaccaactgacttttacggaggactgggaacaccggcattggagcggagtagagttgctgcgagaactcaaaaggcaacagcgttacccacacggagcgcccgtggtgttcacttctaatcttgggcgcagtttatattcttctcgggcggagtcccccttgggagagcctgaatggggaatttcgcaaacaccacaggtttggatcgaccatttagcatttgagcaccatggggaagtatggctccaatgggactcgaacgacgccctcttcccacctgctttagtcgagactctgtttgacgcgtactgtcaattgataaaccagctgtgcgacgatgaatccgcatggcaaaagcccttcgcggacatgatgccggcgagtcagcgtgctattcgtgagcgggtgaacgctaccggcgcaccgatcccggagggcctcttacacgaagggatttttcggatcgctcttcaacagcctcaggcgctcgcggtaacggacatgcggtaccaatggaatagttatcgagagatgcgggaacaggtcgtcgctttggcaaatctactccgagagcgcggggtcaagccaggggactcagtcgctgtagcgcttcctcggtcagtcttcctaaccttggctctccacgcgatcgtagaggcgggtgcggcgtggcttcccctcgacacgggctatccggacgatcggttgaagatgatgctagaggatgcacgaccctctctgttaatcacaaccgacgatcaactccccaggttctcagacgtccctaatcttaccagtctatgttacaacgcgcccctcactccacaaggcagcgctcctttacaacttagtcagccgcaccataccgcttatatcatttttacgtccggttccacgggcaggccgaagggtgtaatggtgggccaaactgcaatagtgaatagactattgtggatgcaaaaccactacccgcttaccggggaggacgtagtggctcaaaagactccctgctctttcgatgtcagcgtgtgggagttcttttggccttttatagccggcgctaaattggttatggcggagccggaagctcaccgagaccctttggccatgcaacagttctttgcagagtatggagtcacaacgacgcatttcgtcccatcgatgttagccgcgttcgtagcatcattgacgccacaaactgcgagacagtcatgtgccacacttaagcaagtcttctgctctggtgaggcccttcctgcggacctatgtcgggaatggcaacagcttactggagcccccttgcacaatctttacgggccgactgaggccgcagttgacgtatcgtggtatccagcgttcggggaggagctagcccaagtgcgagggtctagtgttccaattggatacccggtgtggaacacagggttaaggatcctcgacgccatgatgcatccggtaccaccaggtgtcgctggggatttgtacctgactggcattcaactggcacagggttatctagggcggcctgacttaacagctagccgattcatagcagatccattcgctcccggagagcggatgtaccgaacaggcgacgtggcacgctggttagataatggcgctgtcgagtatcttgggcggtcagacgatcagttaaagatacgtggacaacggattgagcttggtgaaatagaccgagttatgcaggcactaccagatgtcgagcaagccgtagcctcttgtgccattgcgcgagaagacattcccgggaacaagcacttggttgcgtacatagtgccgcaagaggagcagacctgcacagagcggtcacgttcaactctcacagtttccttcgtccgttctttcttaaaggagaaactaccagaatatatggtaccgtccgcgatcgtgatattagacgctctgccactcacgccaaatggaaagttggatagaagagctctgcctgctcctgacttgcactcgcaactcctggataaatacgttgctcccagaaacccaatagagactattatcgcggcagcattctcttcattgcttggatgcgacgtccaagatgcggacgcagatttctttgcgctcgggggccatagtctattggccatgaagctcgcagcgcaattgtcgagacaggtagcacggcaagtaacgcccgggcaagtcatggtcgcctcgacagtcgcgaaactcgcgaccattatcgacgctgagacatccggggaagataaccctatccccctatgtcaaggcgatggggaggagatgagcacatggctacgtcgttttggacccccagtcgaacatcgggccaggctagtgtgtttcccccacgcaggcgcagcggcggattcatacttagacctagcaagagcgttagcaccagagatcgatgttcatgctgttcaataccccggcaggcaagacagaagggacgaggagccattaggaaccgcaggtgaaattgcagatgaagtggcagcggtgctacgtgcgtcgggaggggatgggccttttgcacttttcggccacagtatgggcgccctcatcgcgtacgagacagcaaggcgattagagagggaaccgggagggggacccttacgtttattcgtgagcggacaaacagcgccacgtgtccatgaacgaagaactgatctgcccggtgacgatggactcgtggacgagcttaggcgacttggcacctccgaggcagcgctcgcagacgaagccctgctggctatgtctctcccggtgctcagggcggattatagggtgttaagatcctacgcttgggcggatggtcccccactacgcgccggtataactgccctctgcggtgatgcagacccactaactgcaacaggggatgcggaacgctggttacaacattccgtgattccgggtcggacacggacatttcccggtgggcatttttatttaggggaacaagtgaccgaggtggcaggggctgtccgtagagatttactgagagcagggttagcgggttga

SEQ ID NO: 10 - DNA, 13251 bp, Artificial Sequence
  IOH
atggttgccaaacatagtctggaaaacggtgtctttcacaagatgactgaaaacgagaaggaattgatccttcatttcaacaacactaagacagattaccctaagaacaagacgttgcatgaactttttgaagagcaggcaatgaaaaccccggatcacacagcactggtgttcggcgctcagagaatgacctacagggaactgaacgagaaggcgaatcaaacggcccgtctgttacgcgaaaaagggatcggacgtggcagcattgcggccattatcgcagatcgctcttttgaaatgatcatcggaatcatcggcatcctaaaggcaggcggtgcttatctgccgattgacccagaaaccccgaaagatcgtatcgcgttcatgctgagcgataccaaggcagctgtattgcttacgcagggaaaagcggccgatggcattgactgcgaagcggatatcgtgcaactggaccgtgaagccagcgatggtttttctaaagagccgctgagctctgttaatgatagtggcgacaccgcgtatattatctacacgagtggttccaccgggaccccgaaaggtgtgattaccccgcattattccgttatccgcgtggttcagaacactaactacatcgatatcacagaagacaacgtaatcctccaactatcaaactactcgttcgacggtagtgtgtttgatattttcggtgcgctcctaaacggggcctccctggtgatgatcgagaaagaagcactgttaaacattaatcgtctgggctcagctatcaatgaagagaaagtgagcgtgatgtttattaccacggcgctgttcaacatgattgccgatatccatgttgactgcctctcaaacctgcgtaaaattctgtttggcggcgaacgagcttcgatcccacatgtccgcaaggtactgaaccacgtcggtcgcgataaattaattcacgtatatggcccgactgaatcaacagtgtacgccacctattacttcataaacgaaattgatgacgaggcggaaactatccccataggtagcccgctggccaataccagcgtgctgattatggacgaagcaggcaaactggtcccaattggagtacctggcgaactgtgtatcgctggtgatgggttgtctaaaggttatcttaaccgtgaagagctcaccgcggaaaaatttatcccgcatccattcattcccggtgaacgtctgtacaagacgggcgaccttgccaaatggctcccagatggaaatatcgaatttataggccgcattgatcatcaggttaaaatccgtggctttcgaattgaactgggggagatcgaaagccgtttagaaatgcacgaggacatcaacgaaaccattgtgacggttcgcgaggatgaagagagccggccgtatatctgtgcatacattaccgctaatcgtgaaatttctcttgatgagctcaagggttttctgggggaaaaattacccgagtatatgatcccggcgtacttcgttaagctggataaactgccgttaacgaagaatggtaaagtcgaccggaaagccctgcctgaacccgatcgtactgcgggcgccgagaacgaatatgaggcaccgcgcaatgaaacagaagagaaactggcagctgtctggcaggacgtgttacatgttgaaaaagcaggcattcatgatcactttgctcaaatgggcggtcattcattgcacgcaatggaacttatcgctaagatcaaggaaaagatgaacgttgagatcccgctgcaccagttatttaagttggcgaccattaaagaactgtcggcgttcatcgaggccaatggcctaccccaggaaattaaacacacgccggcggttcggaccacatccgaagatccaattgccatcgtttcgatggcatgtcgtttaccgggaggagtcaatacgccccaacggctctgggaattactacgggagggtggtgaaaccttgtccgggttcccaacggaccgtggctgggacctagcacggcttcaccaccctgatccggacaaccccggaacgagctacgttgataagggtggatttctcgacgacgcggcgggtttcgacgcagagtttttcggggtttcaccaagggaagctgccgctatggaccctcagcaacgattacttttagagacctcgtgggagctagttgaaaatgcgggcatagatccacatagcctgcgagggacagcgacaggggtgttcctaggagttgcgaagtttggttatggtgaggacacagcagcagcggaagatgttgaaggttattcagttaccggtgttgctcccgctgtggcatctggccgcatatcctacactatgggtttagaaggtccttccatctcggtcgataccgcatgctcaagctcgctagtcgcgcttcatctagccgtagagtccctccgaaagggtgagtcatctatggcggtggtgggtggtgcagccgttatggcgactcctggggtatttgttgatttttcacgccaacgggcgcttgccgcagacggccgttccaaagcgttcggggcaggtgcagatggttttggtttcagcgagggagtcacgctggttctactagagcgtttaagtgaggcgcgtcgtaacggtcatgaagttctagctgtagtgcgcgggtccgcgttaaaccaggacggagcgagcaacggactttcagcaccctccggccctgcgcaacgtagagtaataaggcaagcgctcgaatcgtgtgggcttgaaccgggggatgttgacgcggttgaggcgcatggtactggtacagcactaggtgacccaatagaggccaatgcgctgttggacacttacgggcgagaccgtgatgcggatcgtccactttggttggggtccgttaagagcaatattgggcacactcaagctgcggccggggttacaggactgctgaaggttgtgttagcactgcgcaatggtgagctacctgcaacgttacatgtcgaggaaccaactccacacgtcgattggtcctcaggtggtgtcgcattactggcgggtaatcaaccatggcgaaggggagaaaggaccagaagggcggcagtgagcgcctttggtatctccggtacaaatgctcacgtgatagtggaagaggcgcctcaggaagttcgacccgcccctggccaagggctgtcgccagccgtgtccacgttagttgttgcaggtaaaaccatgcagcgtgtaagtgcgacagctggaatgcttgcagactggatggagggtcctggggccgatgttgcattggcggatgtggcccataccctgaaccatcaccgatcaagacagcccaagttcgggacggttgtagcgcgtgacaggactcaggcgatagctgggctccgtgcattggcggctggtcaacatgctcctggggtcgtcaacccagctgaaggttccccaggaccaggcaccgtgttcgtttttcccggtcaaggttcgcagagggcagggatgggggaggaactcgcggcagcctttcctgtcttcgctcgaatacatcagcaagtttgggacctcctagatgttcccgacctcgacgttaatgaaaccgggtacgcccaaccagcgctgttcgcgcttcaggtcgcgctctttggccttctggagtcgtggggtgttaggccagatgcagtggtagggcactcagttggtgagctggccgcggggtacgtgtccggtctttggtcactagaggacgcctgcacactagtctcagcaagagcgcgcctaatgcaggcactgcctgctggaggggtgatggcggcagtccccgtctccgaggatgaggcgcgggccgtcctgggcgagggagttgaaattgcggctgtgaatggaccctcgtccgttgtgctctcaggggacgaggcggcagtcttacaggccgccgaaggtctaggtaagtggacgcgactgccgaccagccatgcttttcactcagcgagaatggaacccatgctagaagagtttcgggccgtagcagagggtctgacctatcgtacccctcaagtagctatggctgctggggatcaggtgatgacagcagaatattgggtgcggcaggttcgggacacagttcgcttcggggagcaagtagcgtcattcgaggatgcggtgtttgttgagttaggcgctgacagaagtctagcgcgtttggtggacggcatcgccatgctgcacggtgaccacgaagcgcaggccgcggaccataggcaaatcaccgaagcggttgcggatgcttacgtcttaggccaccttccggattttgcggcgctgcggcggcctcacgcacgaaagttggacttaccaacttatcccttcgagcgtagacagtactggttcagagatgcgcgtgagaggccggaacaacccagagataccggcggacctcgcacagaagcagtccgtctgttagaggatggtaggattgaagaattagctgcacttttgggaggggccagtgatgaccaacacacattacaggtgctgactaagttggcggcgcaacataaccaacaacgaacaacccggtcaatcgctgacgacaggtacgaaataaggtgggaccgatcgacttccccactatccggagcagatgttgaccaagcggggagctggatcgtggtgtcagatgacgcagatgccgttcccccgctagtggacttgctggctgcacgtaacgagccccatcaggttgttggtctacccgcttcggacgcagacgaggagaggctcgcagagactctgcgtgcggctgcgactgaagatgctacccttcggatagtccacgttgcggcgctcgaagcaggcgctacccccagcatgcgttcactgctccgcatgcagcaccgaatactaggtggcacgcggcgggtgttcagggcagcggtcgcagcggagttaagaggtcccatttggatagtgacgcggggagcacaaagagtggctgacaccgatacagttgccccgcatcagtcatgcctctggggatttgggagggcagcatcgctggagctgccgcacgtttggggtggcctagcagatttatcagagggcggtgacaatgcggccgatgagtggagtgcgctagtggaccgcattgccgcaccccacggttcagcagttagggaggaccaactggcgctgagagacagggccgtatatacgccaagactggccagacgttctgcgcccccgagcgggactcccctacatctacgaggggatggcacagtgttaataacaggtgggactggtacactaggtaggctattagcgcgtcacctagtaacagagcatggggtgcggcatctcttactagtttcaaggagaggcgccgatgcccctggctcggatgaactgcgcgcagaaatagaggacttaggtgccagcgcggagatcgcagcgtgtgatacagcggatcgcgatgccctatctgccctactagatggtctcccccggccccttacgggtgtcgttcacgccgctggcgtgttagccgatggacttgtcactagcattgacgagcctgcggtggaacaggttctccgagcaaaggtggacgcggcatggaacctacacgaactcacagctaataccgggctatcctttttcgttcttttctcatcagcagcatcggtcctggcaggtccagggcaaggagtttatgcggctgcaaatgaatcgctcaacgcactagctgcgttaaggcgaactaggggtctgccggccaaggctctgggatggggcctgtgggccatcgggcgggcaatcgcttttgcggagcagaccggggacgccatcgctccagaggaaggagcatacgcttttgaaactctgttaaggcataaccgtgcctactcgggatatgcgcccgtcattggatctccctggttgaccgcgttcgcacagcattccccctttgcagaaaaattccaatcactcggacagaatcggtcagggacatcgaaattcttagcggagctagttgacctgcctcgtgaggaatggccggataggctcaggagactactagagttagttaggtcccatgccgccgcggtctccggttacggtagtgcagatcaactgccggaaagaaaagcgttcaaggatttggggtttgattcgctggccgccgttgaactgcgtaaccggctgggaacggctacaggggtacgactgccgtcaaccctagtatttgatcacccaactccgctggccgtcgctgagcacttaagagataggctacctggaattggggcgctagttcccgctcccgtggtaatcgcagcaggccgtacggaggaaccaattgccatagtatccatggcttgccggttacccggtggtgtgaataccccacagagactatgggaattattacgtgaagggggagaaaccctcagtggcttccctaccgaccgagggtgggacctcgcgaggttgcatcacccagacccagacaaccccggtacgtcatacgttgataaagggggattcctggacgatgcggcagggtttgacgcagaatttttcggtgtgagccccagagaagcagcggctatggacccgcagcagagattactcctcgaaaccagctgggagttagtcgagaatgcagggattgatccacatagcctaagggggaccgccactggtgtcttcctcggcgttgccaagtttgggtatggcgaggatacggcagctgccgaagacgtcgaggggtactctgtcactggtgtagccccggcagtggcgtcgggcagaattagttacacgatggggttggaagggccgtctatttcggttgataccgcctgttcctccagtctggttgcactccaccttgcagtcgagtcgctccggaaaggagaaagcagtatggccgtggtcgggggagcggcggtgatggccacaccgggtgtgtttgtggatttttcccgacagagagccttggccgcggatgggcgttcaaaggcgttcggagcaggtgcagacgggtttggatttagcgaaggtgtgacactggttctcctagaaagattaagtgaagcccggcgtaacggccatgaggtgctggcagttgttagaggttccgcattaaaccaggacggggcttcgaacgggctgagcgccccctcgggcccggcacagagaagagtgatacgccaagcactcgaatcgtgtggcctagaaccaggtgacgttgacgcggtggaagcgcacgggacaggaactgcgttaggggacccgatagaagcaaacgccttgctggacacttatggtagagatcgtgatgcggatcgacccctctggttaggaagtgttaagtcaaatataggacacactcaggcagcggcgggagtaactgggctgctcaaagtagtcctagccttacgcaatggggaactacccgccaccctacatgtcgaggaaccgacaccgcatgtggattggtcgagcgggggagttgctctcttggcgggtaatcagccgtggcgaagaggtgaacgaacccgtagagccgccgtgtccgcattcgggatcagtggtacgaacgcgcacgtgattgtggaagaagctccacaagaggtgagaccagcgcccggtcaaggactctcgcccgcggtgtcaaccttggtagtggcgggtaaaactatgcagcgtgtttcggcaaccgccggtatgctcgcagattggatggaaggcccaggtgcagatgtggcgctggcggacgtggcgcacacgttaaatcatcaccgttcacggcaaccaaagttcggtacggtggtggccagggaccggacacaggcaatcgccggactaagagcgctggcggcgggtcagcacgccccaggggttgttaaccctgctgaaggaagtccaggtccagggacggtgttcgtgtttcctggccaggggtcccagcgtgcaggcatgggggaggagttggctgcggctttccccgtgtttgccagaatccaccagcaagtgtgggatttactcgatgttcctgatctcgacgttaacgaaacggggtacgcacaaccagcactcttcgcactccaagtggcgctgtttgggctcctcgaatcatggggagtacggccggatgccgtggtcgggcatagtgtaggggaattagcggcagggtacgtttccgggctttggagtcttgaggatgcttgcacgctcgtgtcggcgagagcccgtctaatgcaagccttaccggcaggtggtgttatggcggcagttccagtgtccgaagacgaagcacgggctgtgttgggggaaggagtcgaaatagctgcggtcaacggtccgtcgagcgtggttctaagcggtgatgaagcagcagtgctccaggccgcggaagggttaggcaagtggacgcgattaccgacctcgcatgcattccattctgctcgtatggaaccaatgctggaagagtttagagcagtggcggaaggtctaacatacaggactccccaggtggcaatggccgccggagaccaggttatgaccgctgaatactgggtgcgtcaggttagggatacagttcgttttggcgagcaagttgcctcgttcgaggatgctgtattcgtggaattgggagcagatcgctctcttgcacggctagtcgatggtatcgcgatgttgcacggggatcatgaggcacaggctggtatgcggagagaacaacccttgcccttaggtttacgaagattgctaaccgacctgcataacgctggtgctgccgtcgattttagtgttttgtgcccacaaggtcgtctggttgacgcaccgttaccagcctggtcacaccggtttctcttctatgaccgggaaggagtggacaatagatcaccagggggaagcacagtggcggtccacccgcttttactagccgcggtggatgtgccgggccacggtggagcggttttcacgggtagactctcgactgacgagcaaccgtggttagcggagcacgttgtcgggggaagaaccctagttcctggttctgttttagtcgatctagccttagcggcaggcgaagacgtagggctaccggtgttagaagaattagtattgcagaggccgctggtgcttgccggcgcgggagcactcctacggatgtcggtcggggcaccagacgagagcggtagaagaactatcgatgttcacgcagctgaagacgtcgccgatttagcagatgcccaatggtcccagcacgccaccgggactttagcccaaggggtagcggcggggcccagggacacagagcaatggcccccagaggatgccgtccggattccattagacgaccattatgatggtctcgcggaacagggttatgagtacggtccgtcgtttcaggcgctagtggcctacgtggcggaggatgcgactgcgacaatgttagcggaagtcgcgcttccgggcagcattagatcgcaacaaggtctatacgccatccatcccgcactgctggacgcttgttttcaatctgtcggagcccacccagacagtcaatccgtcgggtcaggtctactcgtacccctcggtgttcggagagttcgtgcgtacgcacccgtaaggaccgcccgttattgttacacccgcgtcacgaaagttgaactagctggggttgaggccgacatcgacgttctggatgctcacggcacagtgcttctagccgtgtgcggtcttcgtatcgggaccggagtgagcgagagggacaaacacaacagagttctcaatgagcgcctactcaccatcgaatggcatcagcgtgaactaccagaaatggacccctcgggtgccgggaagtggctcctaatctcggactgtgcagcatccgatgtcaccgctacacgactggctgatgccttccgggagcacagcgctgcgtgcactaccatgcggtggccacttcacgatgatcaactagcagccgccgaccaactccgggaccaggtgggttcagatgagttttctggcgtggtagtactaacagggccaaacacagggacccctcatcagggttccgcagaccgtggcgccgagtacgttaggcggttagttggaatcgctcgtgaacttagcgatcttcccggagcggttccccgtatgtatgtcgtcacaaggggagcgcagagagtccttgccgatgattgtgttaatttagaacagggagggctcagaggtctgctgaggaccatcggtgctgagcacccacatctccgcgccacccaaattgatgttgatgagcagacaggagtagagcagctggcgcgacaactcctagctacatcggaggaagacgagacagcctggagggacaacgaatggtacgttgcgaggttatgccccacacccctgaggccacaggaacgtaggacaatagtggcggaccatcaacagtctggtatgcggttacaaatacgtacgcccggtgcaatcgatagtgtggcctttgaacccgcacccgatgtagagcaacccttacgggcgggtgaagttcgggttgacgttagagcaaccggtgttaatttccgtgacgttctactcgctctcgggatgtatccccagaaagctgacatggggacagaagcagctggtgttgtaacagcagtgggacctgatgtcgatgcgtttgcgcctggtgatagagttctagggctattccaaggggcatttgctccaattgcggtgactgaccatcgtttactggcacgggtgccagacgggtggtcagatgccgatgcggcggcggtgccaatagcttacacgacagcacattatgcgctgcacgacctggcggggttgcgggcggggcaatctgtcctgatacacgcggcagcgggtggtgttggtatggccgctgttgcactggcacggagggccggcgcagaagttctggctaccgcaggacctgcaaaacacggtacgctacgggcattagggctagatgatgaacacatcgcttcgagtcgggagaccgggttcgcgcgtaagttccgagagcggactgggggacgaggagtggacgtcgttctaaacagcttgaccggcgaactattagacgagtccgcggatctcctcgcggaggacggagtcttcgtggaaatgggaaagactgatctgcgcgatgcaggggactttcgtgggcgctacgccccgtttgatctaggggaagcaggcgatgacaggctcggggaaattctacgtgaggtggtgggactgctcggtgcaggggaactcgaccgactccctgttagcgcgtgggaattggggataccccagacggggaagtcgttagtgacgctgccacccgaacaagcgcaagttttcagaccagacggcactgtattgatcaccgggggaacgggaacgttaggtcggctgctggcccgtcatctggttacagagcacggggtgcgtcacctgctgctagtgtcgaggagaggagcagatgcccctggatcggacgagctgagggccgaaatcgaggatctcggagcatcagcggaaattgcagcatgtgatacagccgatcgagacgctctcagcgcgttgctagatggactgccgaggccactgaccggagtagttcacgccgcgggagtcctcgctgacggtctggttacatccatcgacgagcccgcagtcgaacaagttctccgtgcaaaagttgatgcggcctggaacctgcacgagctaactgcgaacaccggtctcagctttttcgtgctgttctcgtcagccgcaagtgtgttagcggggccggggcagggagtatatgcggcagcgaacgaatctttaaacgctctggccgctctgcgtaggactaggggtttacccgcaaaagcattgggatggggattatgggcgatagggcgtgcaatagcatttgccgagcagaccggtgacgcaatcgccccggaggaaggcgcgtacgccttcgagacactactcagacataacagggcgtactcgggttacgctcccgtgatagggtcaccatggctgactgcgttcgcccaacattcgccctttgcggagaagttccagtccctggggcaaaatagatccgggacgtctaagtttctggcagaattagtcgatctgccaagagaagaatggccagatcggttacgtcgtctattagaactggtgaggtctcatgctgccgcagtttcggggtatggatcggcagaccaattaccagaaagaaaagcattcaaagacctcggattcgattcactggcagcagtcgaactaagaaatcgtctagggaccgcgacaggcgtccggctgcccagtactctggtgttcgaccacccaaccccacttgcggttgcggaacatctacgtgatcgtctaacatccggggaagataaccctatccccctatgtcaaggcgatggggaggagatgagcacatggctacgtcgttttggacccccagtcgaacatcgggccaggctagtgtgtttcccccacgcaggcgcagcggcggattcatacttagacctagcaagagcgttagcaccagagatcgatgttcatgctgttcaataccccggcaggcaagacagaagggacgaggagccattaggaaccgcaggtgaaattgcagatgaagtggcagcggtgctacgtgcgtcgggaggggatgggccttttgcacttttcggccacagtatgggcgccctcatcgcgtacgagacagcaaggcgattagagagggaaccgggagggggacccttacgtttattcgtgagcggacaaacagcgccacgtgtccatgaacgaagaactgatctgcccggtgacgatggactcgtggacgagcttaggcgacttggcacctccgaggcagcgctcgcagacgaagccctgctggctatgtctctcccggtgctcagggcggattatagggtgttaagatcctacgcttgggcggatggtcccccactacgcgccggtataactgccctctgcggtgatgcagacccactaactgcaacaggggatgcggaacgctggttacaacattccgtgattccgggtcggacacggacatttcccggtgggcatttttatttaggggaacaagtgaccgaggtggcaggggctgtccgtagagatttactgagagcagggttagcgggttga

SEQ ID NO: 11 - DNA, 11598 bp, Artificial Sequence
  IOO
atggttgccaaacatagtctggaaaacggtgtctttcacaagatgactgaaaacgagaaggaattgatccttcatttcaacaacactaagacagattaccctaagaacaagacgttgcatgaactttttgaagagcaggcaatgaaaaccccggatcacacagcactggtgttcggcgctcagagaatgacctacagggaactgaacgagaaggcgaatcaaacggcccgtctgttacgcgaaaaagggatcggacgtggcagcattgcggccattatcgcagatcgctcttttgaaatgatcatcggaatcatcggcatcctaaaggcaggcggtgcttatctgccgattgacccagaaaccccgaaagatcgtatcgcgttcatgctgagcgataccaaggcagctgtattgcttacgcagggaaaagcggccgatggcattgactgcgaagcggatatcgtgcaactggaccgtgaagccagcgatggtttttctaaagagccgctgagctctgttaatgatagtggcgacaccgcgtatattatctacacgagtggttccaccgggaccccgaaaggtgtgattaccccgcattattccgttatccgcgtggttcagaacactaactacatcgatatcacagaagacaacgtaatcctccaactatcaaactactcgttcgacggtagtgtgtttgatattttcggtgcgctcctaaacggggcctccctggtgatgatcgagaaagaagcactgttaaacattaatcgtctgggctcagctatcaatgaagagaaagtgagcgtgatgtttattaccacggcgctgttcaacatgattgccgatatccatgttgactgcctctcaaacctgcgtaaaattctgtttggcggcgaacgagcttcgatcccacatgtccgcaaggtactgaaccacgtcggtcgcgataaattaattcacgtatatggcccgactgaatcaacagtgtacgccacctattacttcataaacgaaattgatgacgaggcggaaactatccccataggtagcccgctggccaataccagcgtgctgattatggacgaagcaggcaaactggtcccaattggagtacctggcgaactgtgtatcgctggtgatgggttgtctaaaggttatcttaaccgtgaagagctcaccgcggaaaaatttatcccgcatccattcattcccggtgaacgtctgtacaagacgggcgaccttgccaaatggctcccagatggaaatatcgaatttataggccgcattgatcatcaggttaaaatccgtggctttcgaattgaactgggggagatcgaaagccgtttagaaatgcacgaggacatcaacgaaaccattgtgacggttcgcgaggatgaagagagccggccgtatatctgtgcatacattaccgctaatcgtgaaatttctcttgatgagctcaagggttttctgggggaaaaattacccgagtatatgatcccggcgtacttcgttaagctggataaactgccgttaacgaagaatggtaaagtcgaccggaaagccctgcctgaacccgatcgtactgcgggcgccgagaacgaatatgaggcaccgcgcaatgaaacagaagagaaactggcagctgtctggcaggacgtgttacatgttgaaaaagcaggcattcatgatcactttgctcaaatgggcggtcattcattgcacgcaatggaacttatcgctaagatcaaggaaaagatgaacgttgagatcccgctgcaccagttatttaagttggcgaccattaaagaactgtcggcgttcatcgaggccaatggcctaccccaggaaattaaacacacgccggcggttcggaccacatccgaagatccaattgccatcgtttcgatggcatgtcgtttaccgggaggagtcaatacgccccaacggctctgggaattactacgggagggtggtgaaaccttgtccgggttcccaacggaccgtggctgggacctagcacggcttcaccaccctgatccggacaaccccggaacgagctacgttgataagggtggatttctcgacgacgcggcgggtttcgacgcagagtttttcggggtttcaccaagggaagctgccgctatggaccctcagcaacgattacttttagagacctcgtgggagctagttgaaaatgcgggcatagatccacatagcctgcgagggacagcgacaggggtgttcctaggagttgcgaagtttggttatggtgaggacacagcagcagcggaagatgttgaaggttattcagttaccggtgttgctcccgctgtggcatctggccgcatatcctacactatgggtttagaaggtccttccatctcggtcgataccgcatgctcaagctcgctagtcgcgcttcatctagccgtagagtccctccgaaagggtgagtcatctatggcggtggtgggtggtgcagccgttatggcgactcctggggtatttgttgatttttcacgccaacgggcgcttgccgcagacggccgttccaaagcgttcggggcaggtgcagatggttttggtttcagcgagggagtcacgctggttctactagagcgtttaagtgaggcgcgtcgtaacggtcatgaagttctagctgtagtgcgcgggtccgcgttaaaccaggacggagcgagcaacggactttcagcaccctccggccctgcgcaacgtagagtaataaggcaagcgctcgaatcgtgtgggcttgaaccgggggatgttgacgcggttgaggcgcatggtactggtacagcactaggtgacccaatagaggccaatgcgctgttggacacttacgggcgagaccgtgatgcggatcgtccactttggttggggtccgttaagagcaatattgggcacactcaagctgcggccggggttacaggactgctgaaggttgtgttagcactgcgcaatggtgagctacctgcaacgttacatgtcgaggaaccaactccacacgtcgattggtcctcaggtggtgtcgcattactggcgggtaatcaaccatggcgaaggggagaaaggaccagaagggcggcagtgagcgcctttggtatctccggtacaaatgctcacgtgatagtggaagaggcgcctcaggaagttcgacccgcccctggccaagggctgtcgccagccgtgtccacgttagttgttgcaggtaaaaccatgcagcgtgtaagtgcgacagctggaatgcttgcagactggatggagggtcctggggccgatgttgcattggcggatgtggcccataccctgaaccatcaccgatcaagacagcccaagttcgggacggttgtagcgcgtgacaggactcaggcgatagctgggctccgtgcattggcggctggtcaacatgctcctggggtcgtcaacccagctgaaggttccccaggaccaggcaccgtgttcgtttttcccggtcaaggttcgcagagggcagggatgggggaggaactcgcggcagcctttcctgtcttcgctcgaatacatcagcaagtttgggacctcctagatgttcccgacctcgacgttaatgaaaccgggtacgcccaaccagcgctgttcgcgcttcaggtcgcgctctttggccttctggagtcgtggggtgttaggccagatgcagtggtagggcactcagttggtgagctggccgcggggtacgtgtccggtctttggtcactagaggacgcctgcacactagtctcagcaagagcgcgcctaatgcaggcactgcctgctggaggggtgatggcggcagtccccgtctccgaggatgaggcgcgggccgtcctgggcgagggagttgaaattgcggctgtgaatggaccctcgtccgttgtgctctcaggggacgaggcggcagtcttacaggccgccgaaggtctaggtaagtggacgcgactgccgaccagccatgcttttcactcagcgagaatggaacccatgctagaagagtttcgggccgtagcagagggtctgacctatcgtacccctcaagtagctatggctgctggggatcaggtgatgacagcagaatattgggtgcggcaggttcgggacacagttcgcttcggggagcaagtagcgtcattcgaggatgcggtgtttgttgagttaggcgctgacagaagtctagcgcgtttggtggacggcatcgccatgctgcacggtgaccacgaagcgcaggccgcggaccataggcaaatcaccgaagcggttgcggatgcttacgtcttaggccaccttccggattttgcggcgctgcggcggcctcacgcacgaaagttggacttaccaacttatcccttcgagcgtagacagtactggttcagagatgcgcgtgagaggccggaacaacccagagataccggcggacctcgcacagaagcagtccgtctgttagaggatggtaggattgaagaattagctgcacttttgggaggggccagtgatgaccaacacacattacaggtgctgactaagttggcggcgcaacataaccaacaacgaacaacccggtcaatcgctgacgacaggtacgaaataaggtgggaccgatcgacttccccactatccggagcagatgttgaccaagcggggagctggatcgtggtgtcagatgacgcagatgccgttcccccgctagtggacttgctggctgcacgtaacgagccccatcaggttgttggtctacccgcttcggacgcagacgaggagaggctcgcagagactctgcgtgcggctgcgactgaagatgctacccttcggatagtccacgttgcggcgctcgaagcaggcgctacccccagcatgcgttcactgctccgcatgcagcaccgaatactaggtggcacgcggcgggtgttcagggcagcggtcgcagcggagttaagaggtcccatttggatagtgacgcggggagcacaaagagtggctgacaccgatacagttgccccgcatcagtcatgcctctggggatttgggagggcagcatcgctggagctgccgcacgtttggggtggcctagcagatttatcagagggcggtgacaatgcggccgatgagtggagtgcgctagtggaccgcattgccgcaccccacggttcagcagttagggaggaccaactggcgctgagagacagggccgtatatacgccaagactggccagacgttctgcgcccccgagcgggactcccctacatctacgaggggatggcacagtgttaataacaggtgggactggtacactaggtaggctattagcgcgtcacctagtaacagagcatggggtgcggcatctcttactagtttcaaggagaggcgccgatgcccctggctcggatgaactgcgcgcagaaatagaggacttaggtgccagcgcggagatcgcagcgtgtgatacagcggatcgcgatgccctatctgccctactagatggtctcccccggccccttacgggtgtcgttcacgccgctggcgtgttagccgatggacttgtcactagcattgacgagcctgcggtggaacaggttctccgagcaaaggtggacgcggcatggaacctacacgaactcacagctaataccgggctatcctttttcgttcttttctcatcagcagcatcggtcctggcaggtccagggcaaggagtttatgcggctgcaaatgaatcgctcaacgcactagctgcgttaaggcgaactaggggtctgccggccaaggctctgggatggggcctgtgggccatcgggcgggcaatcgcttttgcggagcagaccggggacgccatcgctccagaggaaggagcatacgcttttgaaactctgttaaggcataaccgtgcctactcgggatatgcgcccgtcattggatctccctggttgaccgcgttcgcacagcattccccctttgcagaaaaattccaatcactcggacagaatcggtcagggacatcgaaattcttagcggagctagttgacctgcctcgtgaggaatggccggataggctcaggagactactagagttagttaggtcccatgccgccgcggtctccggttacggtagtgcagatcaactgccggaaagaaaagcgttcaaggatttggggtttgattcgctggccgccgttgaactgcgtaaccggctgggaacggctacaggggtacgactgccgtcaaccctagtatttgatcacccaactccgctggccgtcgctgagcacttaagagataggctacctggaattggggcgctagttcccgctcccgtggtaatcgcagcaggccgtacggaggaaccaattgccatcgtttcgatggcatgtcgtttaccgggaggagtcaatacgccccaacggctctgggaattactacgggagggtggtgaaaccttgtccgggttcccaacggaccgtggctgggacctagcacggcttcaccaccctgatccggacaaccccggaacgagctacgttgataagggtggatttctcgacgacgcggcgggtttcgacgcagagtttttcggggtttcaccaagggaagctgccgctatggaccctcagcaacgattacttttagagacctcgtgggagctagttgaaaatgcgggcatagatccacatagcctgcgagggacagcgacaggggtgttcctaggagttgcgaagtttggttatggtgaggacacagcagcagcggaagatgttgaaggttattcagttaccggtgttgctcccgctgtggcatctggccgcatatcctacactatgggtttagaaggtccttccatctcggtcgataccgcatgctcaagctcgctagtcgcgcttcatctagccgtagagtccctccgaaagggtgagtcatctatggcggtggtgggtggtgcagccgttatggcgactcctggggtatttgttgatttttcacgccaacgggcgcttgccgcagacggccgttccaaagcgttcggggcaggtgcagatggttttggtttcagcgagggagtcacgctggttctactagagcgtttaagtgaggcgcgtcgtaacggtcatgaagttctagctgtagtgcgcgggtccgcgttaaaccaggacggagcgagcaacggactttcagcaccctccggccctgcgcaacgtagagtaataaggcaagcgctcgaatcgtgtgggcttgaaccgggggatgttgacgcggttgaggcgcatggtactggtacagcactaggtgacccaatagaggccaatgcgctgttggacacttacgggcgagaccgtgatgcggatcgtccactttggttggggtccgttaagagcaatattgggcacactcaagctgcggccggggttacaggactgctgaaggttgtgttagcactgcgcaatggtgagctacctgcaacgttacatgtcgaggaaccaactccacacgtcgattggtcctcaggtggtgtcgcattactggcgggtaatcaaccatggcgaaggggagaaaggaccagaagggcggcagtgagcgcctttggtatctccggtacaaatgctcacgtgatagtggaagaggcgcctcaggaagttcgacccgcccctggccaagggctgtcgccagccgtgtccacgttagttgttgcaggtaaaaccatgcagcgtgtaagtgcgacagctggaatgcttgcagactggatggagggtcctggggccgatgttgcattggcggatgtggcccataccctgaaccatcaccgatcaagacagcccaagttcgggacggttgtagcgcgtgacaggactcaggcgatagctgggctccgtgcattggcggctggtcaacatgctcctggggtcgtcaacccagctgaaggttccccaggaccaggcaccgtgttcgtttttcccggtcaaggttcgcagagggcagggatgggggaggaactcgcggcagcctttcctgtcttcgctcgaatacatcagcaagtttgggacctcctagatgttcccgacctcgacgttaatgaaaccgggtacgcccaaccagcgctgttcgcgcttcaggtcgcgctctttggccttctggagtcgtggggtgttaggccagatgcagtggtagggcactcagttggtgagctggccgcggggtacgtgtccggtctttggtcactagaggacgcctgcacactagtctcagcaagagcgcgcctaatgcaggcactgcctgctggaggggtgatggcggcagtccccgtctccgaggatgaggcgcgggccgtcctgggcgagggagttgaaattgcggctgtgaatggaccctcgtccgttgtgctctcaggggacgaggcggcagtcttacaggccgccgaaggtctaggtaagtggacgcgactgccgaccagccatgcttttcactcagcgagaatggaacccatgctagaagagtttcgggccgtagcagagggtctgacctatcgtacccctcaagtagctatggctgctggggatcaggtgatgacagcagaatattgggtgcggcaggttcgggacacagttcgcttcggggagcaagtagcgtcattcgaggatgcggtgtttgttgagttaggcgctgacagaagtctagcgcgtttggtggacggcatcgccatgctgcacggtgaccacgaagcgcaggccgcggaccataggcaaatcaccgaagcggttgcggatgcttacgtcttaggccaccttccggattttgcggcgctgcggcggcctcacgcacgaaagttggacttaccaacttatcccttcgagcgtagacagtactggttcagagatgcgcgtgagaggccggaacaacccagagataccggcggacctcgcacagaagcagtccgtctgttagaggatggtaggattgaagaattagctgcacttttgggaggggccagtgatgaccaacacacattacaggtgctgactaagttggcggcgcaacataaccaacaacgaacaacccggtcaatcgctgacgacaggtacgaaataaggtgggaccgatcgacttccccactatccggagcagatgttgaccaagcggggagctggatcgtggtgtcagatgacgcagatgccgttcccccgctagtggacttgctggctgcacgtaacgagccccatcaggttgttggtctacccgcttcggacgcagacgaggagaggctcgcagagactctgcgtgcggctgcgactgaagatgctacccttcggatagtccacgttgcggcgctcgaagcaggcgctacccccagcatgcgttcactgctccgcatgcagcaccgaatactaggtggcacgcggcgggtgttcagggcagcggtcgcagcggagttaagaggtcccatttggatagtgacgcggggagcacaaagagtggctgacaccgatacagttgccccgcatcagtcatgcctctggggatttgggagggcagcatcgctggagctgccgcacgtttggggtggcctagcagatttatcagagggcggtgacaatgcggccgatgagtggagtgcgctagtggaccgcattgccgcaccccacggttcagcagttagggaggaccaactggcgctgagagacagggccgtatatacgccaagactggccagacgttctgcgcccccgagcgggactcccctacatctacgaggggatggcacagtgttaataacaggtgggactggtacactaggtaggctattagcgcgtcacctagtaacagagcatggggtgcggcatctcttactagtttcaaggagaggcgccgatgcccctggctcggatgaactgcgcgcagaaatagaggacttaggtgccagcgcggagatcgcagcgtgtgatacagcggatcgcgatgccctatctgccctactagatggtctcccccggccccttacgggtgtcgttcacgccgctggcgtgttagccgatggacttgtcactagcattgacgagcctgcggtggaacaggttctccgagcaaaggtggacgcggcatggaacctacacgaactcacagctaataccgggctatcctttttcgttcttttctcatcagcagcatcggtcctggcaggtccagggcaaggagtttatgcggctgcaaatgaatcgctcaacgcactagctgcgttaaggcgaactaggggtctgccggccaaggctctgggatggggcctgtgggccatcgggcgggcaatcgcttttgcggagcagaccggggacgccatcgctccagaggaaggagcatacgcttttgaaactctgttaaggcataaccgtgcctactcgggatatgcgcccgtcattggatctccctggttgaccgcgttcgcacagcattccccctttgcagaaaaattccaatcactcggacagaatcggtcagggacatcgaaattcttagcggagctagttgacctgcctcgtgaggaatggccggataggctcaggagactactagagttagttaggtcccatgccgccgcggtctccggttacggtagtgcagatcaactgccggaaagaaaagcgttcaaggatttggggtttgattcgctggccgccgttgaactgcgtaaccggctgggaacggctacaggggtacgactgccgtcaaccctagtatttgatcacccaactccgctggccgtcgctgagcacttaagagataggctaacatccggggaagataaccctatccccctatgtcaaggcgatggggaggagatgagcacatggctacgtcgttttggacccccagtcgaacatcgggccaggctagtgtgtttcccccacgcaggcgcagcggcggattcatacttagacctagcaagagcgttagcaccagagatcgatgttcatgctgttcaataccccggcaggcaagacagaagggacgaggagccattaggaaccgcaggtgaaattgcagatgaagtggcagcggtgctacgtgcgtcgggaggggatgggccttttgcacttttcggccacagtatgggcgccctcatcgcgtacgagacagcaaggcgattagagagggaaccgggagggggacccttacgtttattcgtgagcggacaaacagcgccacgtgtccatgaacgaagaactgatctgcccggtgacgatggactcgtggacgagcttaggcgacttggcacctccgaggcagcgctcgcagacgaagccctgctggctatgtctctcccggtgctcagggcggattatagggtgttaagatcctacgcttgggcggatggtcccccactacgcgccggtataactgccctctgcggtgatgcagacccactaactgcaacaggggatgcggaacgctggttacaacattccgtgattccgggtcggacacggacatttcccggtgggcatttttatttaggggaacaagtgaccgaggtggcaggggctgtccgtagagatttactgagagcagggttagcgggttga

SEQ ID NO: 12 - DNA, 11937 bp, Artificial Sequence
  IOS
atggttgccaaacatagtctggaaaacggtgtctttcacaagatgactgaaaacgagaaggaattgatccttcatttcaacaacactaagacagattaccctaagaacaagacgttgcatgaactttttgaagagcaggcaatgaaaaccccggatcacacagcactggtgttcggcgctcagagaatgacctacagggaactgaacgagaaggcgaatcaaacggcccgtctgttacgcgaaaaagggatcggacgtggcagcattgcggccattatcgcagatcgctcttttgaaatgatcatcggaatcatcggcatcctaaaggcaggcggtgcttatctgccgattgacccagaaaccccgaaagatcgtatcgcgttcatgctgagcgataccaaggcagctgtattgcttacgcagggaaaagcggccgatggcattgactgcgaagcggatatcgtgcaactggaccgtgaagccagcgatggtttttctaaagagccgctgagctctgttaatgatagtggcgacaccgcgtatattatctacacgagtggttccaccgggaccccgaaaggtgtgattaccccgcattattccgttatccgcgtggttcagaacactaactacatcgatatcacagaagacaacgtaatcctccaactatcaaactactcgttcgacggtagtgtgtttgatattttcggtgcgctcctaaacggggcctccctggtgatgatcgagaaagaagcactgttaaacattaatcgtctgggctcagctatcaatgaagagaaagtgagcgtgatgtttattaccacggcgctgttcaacatgattgccgatatccatgttgactgcctctcaaacctgcgtaaaattctgtttggcggcgaacgagcttcgatcccacatgtccgcaaggtactgaaccacgtcggtcgcgataaattaattcacgtatatggcccgactgaatcaacagtgtacgccacctattacttcataaacgaaattgatgacgaggcggaaactatccccataggtagcccgctggccaataccagcgtgctgattatggacgaagcaggcaaactggtcccaattggagtacctggcgaactgtgtatcgctggtgatgggttgtctaaaggttatcttaaccgtgaagagctcaccgcggaaaaatttatcccgcatccattcattcccggtgaacgtctgtacaagacgggcgaccttgccaaatggctcccagatggaaatatcgaatttataggccgcattgatcatcaggttaaaatccgtggctttcgaattgaactgggggagatcgaaagccgtttagaaatgcacgaggacatcaacgaaaccattgtgacggttcgcgaggatgaagagagccggccgtatatctgtgcatacattaccgctaatcgtgaaatttctcttgatgagctcaagggttttctgggggaaaaattacccgagtatatgatcccggcgtacttcgttaagctggataaactgccgttaacgaagaatggtaaagtcgaccggaaagccctgcctgaacccgatcgtactgcgggcgccgagaacgaatatgaggcaccgcgcaatgaaacagaagagaaactggcagctgtctggcaggacgtgttacatgttgaaaaagcaggcattcatgatcactttgctcaaatgggcggtcattcattgcacgcaatggaacttatcgctaagatcaaggaaaagatgaacgttgagatcccgctgcaccagttatttaagttggcgaccattaaagaactgtcggcgttcatcgaggccaatggcctaccccaggaaattaaacacacgccggcggttcggaccacatccgaagatccaattgccatcgtttcgatggcatgtcgtttaccgggaggagtcaatacgccccaacggctctgggaattactacgggagggtggtgaaaccttgtccgggttcccaacggaccgtggctgggacctagcacggcttcaccaccctgatccggacaaccccggaacgagctacgttgataagggtggatttctcgacgacgcggcgggtttcgacgcagagtttttcggggtttcaccaagggaagctgccgctatggaccctcagcaacgattacttttagagacctcgtgggagctagttgaaaatgcgggcatagatccacatagcctgcgagggacagcgacaggggtgttcctaggagttgcgaagtttggttatggtgaggacacagcagcagcggaagatgttgaaggttattcagttaccggtgttgctcccgctgtggcatctggccgcatatcctacactatgggtttagaaggtccttccatctcggtcgataccgcatgctcaagctcgctagtcgcgcttcatctagccgtagagtccctccgaaagggtgagtcatctatggcggtggtgggtggtgcagccgttatggcgactcctggggtatttgttgatttttcacgccaacgggcgcttgccgcagacggccgttccaaagcgttcggggcaggtgcagatggttttggtttcagcgagggagtcacgctggttctactagagcgtttaagtgaggcgcgtcgtaacggtcatgaagttctagctgtagtgcgcgggtccgcgttaaaccaggacggagcgagcaacggactttcagcaccctccggccctgcgcaacgtagagtaataaggcaagcgctcgaatcgtgtgggcttgaaccgggggatgttgacgcggttgaggcgcatggtactggtacagcactaggtgacccaatagaggccaatgcgctgttggacacttacgggcgagaccgtgatgcggatcgtccactttggttggggtccgttaagagcaatattgggcacactcaagctgcggccggggttacaggactgctgaaggttgtgttagcactgcgcaatggtgagctacctgcaacgttacatgtcgaggaaccaactccacacgtcgattggtcctcaggtggtgtcgcattactggcgggtaatcaaccatggcgaaggggagaaaggaccagaagggcggcagtgagcgcctttggtatctccggtacaaatgctcacgtgatagtggaagaggcgcctcaggaagttcgacccgcccctggccaagggctgtcgccagccgtgtccacgttagttgttgcaggtaaaaccatgcagcgtgtaagtgcgacagctggaatgcttgcagactggatggagggtcctggggccgatgttgcattggcggatgtggcccataccctgaaccatcaccgatcaagacagcccaagttcgggacggttgtagcgcgtgacaggactcaggcgatagctgggctccgtgcattggcggctggtcaacatgctcctggggtcgtcaacccagctgaaggttccccaggaccaggcaccgtgttcgtttttcccggtcaaggttcgcagagggcagggatgggggaggaactcgcggcagcctttcctgtcttcgctcgaatacatcagcaagtttgggacctcctagatgttcccgacctcgacgttaatgaaaccgggtacgcccaaccagcgctgttcgcgcttcaggtcgcgctctttggccttctggagtcgtggggtgttaggccagatgcagtggtagggcactcagttggtgagctggccgcggggtacgtgtccggtctttggtcactagaggacgcctgcacactagtctcagcaagagcgcgcctaatgcaggcactgcctgctggaggggtgatggcggcagtccccgtctccgaggatgaggcgcgggccgtcctgggcgagggagttgaaattgcggctgtgaatggaccctcgtccgttgtgctctcaggggacgaggcggcagtcttacaggccgccgaaggtctaggtaagtggacgcgactgccgaccagccatgcttttcactcagcgagaatggaacccatgctagaagagtttcgggccgtagcagagggtctgacctatcgtacccctcaagtagctatggctgctggggatcaggtgatgacagcagaatattgggtgcggcaggttcgggacacagttcgcttcggggagcaagtagcgtcattcgaggatgcggtgtttgttgagttaggcgctgacagaagtctagcgcgtttggtggacggcatcgccatgctgcacggtgaccacgaagcgcaggccgcggaccataggcaaatcaccgaagcggttgcggatgcttacgtcttaggccaccttccggattttgcggcgctgcggcggcctcacgcacgaaagttggacttaccaacttatcccttcgagcgtagacagtactggttcagagatgcgcgtgagaggccggaacaacccagagataccggcggacctcgcacagaagcagtccgtctgttagaggatggtaggattgaagaattagctgcacttttgggaggggccagtgatgaccaacacacattacaggtgctgactaagttggcggcgcaacataaccaacaacgaacaacccggtcaatcgctgacgacaggtacgaaataaggtgggaccgatcgacttccccactatccggagcagatgttgaccaagcggggagctggatcgtggtgtcagatgacgcagatgccgttcccccgctagtggacttgctggctgcacgtaacgagccccatcaggttgttggtctacccgcttcggacgcagacgaggagaggctcgcagagactctgcgtgcggctgcgactgaagatgctacccttcggatagtccacgttgcggcgctcgaagcaggcgctacccccagcatgcgttcactgctccgcatgcagcaccgaatactaggtggcacgcggcgggtgttcagggcagcggtcgcagcggagttaagaggtcccatttggatagtgacgcggggagcacaaagagtggctgacaccgatacagttgccccgcatcagtcatgcctctggggatttgggagggcagcatcgctggagctgccgcacgtttggggtggcctagcagatttatcagagggcggtgacaatgcggccgatgagtggagtgcgctagtggaccgcattgccgcaccccacggttcagcagttagggaggaccaactggcgctgagagacagggccgtatatacgccaagactggccagacgttctgcgcccccgagcgggactcccctacatctacgaggggatggcacagtgttaataacaggtgggactggtacactaggtaggctattagcgcgtcacctagtaacagagcatggggtgcggcatctcttactagtttcaaggagaggcgccgatgcccctggctcggatgaactgcgcgcagaaatagaggacttaggtgccagcgcggagatcgcagcgtgtgatacagcggatcgcgatgccctatctgccctactagatggtctcccccggccccttacgggtgtcgttcacgccgctggcgtgttagccgatggacttgtcactagcattgacgagcctgcggtggaacaggttctccgagcaaaggtggacgcggcatggaacctacacgaactcacagctaataccgggctatcctttttcgttcttttctcatcagcagcatcggtcctggcaggtccagggcaaggagtttatgcggctgcaaatgaatcgctcaacgcactagctgcgttaaggcgaactaggggtctgccggccaaggctctgggatggggcctgtgggccatcgggcgggcaatcgcttttgcggagcagaccggggacgccatcgctccagaggaaggagcatacgcttttgaaactctgttaaggcataaccgtgcctactcgggatatgcgcccgtcattggatctccctggttgaccgcgttcgcacagcattccccctttgcagaaaaattccaatcactcggacagaatcggtcagggacatcgaaattcttagcggagctagttgacctgcctcgtgaggaatggccggataggctcaggagactactagagttagttaggtcccatgccgccgcggtctccggttacggtagtgcagatcaactgccggaaagaaaagcgttcaaggatttggggtttgattcgctggccgccgttgaactgcgtaaccggctgggaacggctacaggggtacgactgccgtcaaccctagtatttgatcacccaactccgctggccgtcgctgagcacttaagagataggctactgccagtagaacagccttttgtgcactcaccggaagagcggtatcgaccattcgcgttaacggatgttcagcaagcctacctggtcgggcgccagccgggatttgccctgggcggtgtaggctcgcatttcttcgtggaattcgagatcgcagatctcgacatacaccgcctggaaaaagtgtggaaccgtttaattgcacgtcatgatatgttgcgcgctgtggttcgtgacggtcagcaacgtgtactggaacagaccccgccatgggtcataccagcacatattcttcacagtcctgaagaggcattacaggttcgtgatcgtttagctcaccaagtgttgaaccccgaagtctggccggtatttgatctgcaggtgggcttcgttgacggtatgccggcccgtttatggttgtgccttgataacctgttattggacgggctgagcatgcagattcttctctctgaactggagcatggatatcgctacccacagcaactccctcccccgttgccgatcacttttcgcgattatcttcagcaaccggcactccgtaccccaaatcctgactcattggcttggtggcagacgcaactggatgacatcccacctgcgcccgccctcccgctacgttgtctgcctcaagatgttgaaaccccgcgtttcgcgcgtctgtacggcgcaatggattctgctcgttggcgtcgcctgaaacagcgtgcggccgacgcacatctgactccgtcagctgtcctactgagcgtatggtctacagtgctggcagcttggtcggcgcagccggattttactctcaacctgacattattcgaccggcgaccactgcaccctcagattaatcaaatccttggcgattttacctcactgatgttattgtcgtggcatccgggtgagagttggctgcagtccgcgcgtcttctccagcaacgcctttcagaatcgctcaaccaccgtgatgttagcgccattcgcgtcatgcggcagctggcgagaaggcaaaatgtcccggccgtacccatgccggtcgtatttacctctgcgctggggtttgaacaggataacttcctggcccgtcgcaatctactgaaaccggtgtggggtatcagtcagacgccgcaagtttggctggaccatcaggtctatgaatccgagggcgaactgcgttttaactgggatttcgttgcggccctgtttccggacggtcaagtggaacgtcagttcgcgcaatactgcgccttattgaatcgcatggcagaagatgacagctcttggcagttgccgcttgctgatctggtgcccccgttaaaagtgaccgagcggcgagcgagaaggctgcgtccagaacgcgcccagcctcgtattgcagctgataagagttccgttagtctgatctgtgacacttttcgtgaggtggttggggaacccgtggcaccggctgagaactttttcgaagcgggagccacatccctcaatctggttcagctgcatgtccttctccaacgtcacgaatttgcgaccttaacgctactggatttgttcacccatccaagccctgttgcattggctaactatcttgcgggtgtggccctggaagagaaaacgaagcgcgtgcggccggttcggcgaagacagcgtcgcattcagcacttgcccttagtagctgcgcaacctggaatatggatggccgagaagttatctgaactaccatcagcgtggagcgtagcgcattacgtggagctcactggtgaggttgactcgcctcttttggccagggcggtagtggctggccttgcacaagctgacaccttaagaatgcgtttcacagaggataatggggaagtttggcaatgggtagacgatgcgttaacatttgagttaccggaaatcatagacctgcgcactaacatagaccctcacgggacagctcaggccttgatgcaagcggacctgcaacaggacctacgtgtggattcggggaagcctctggtcttccatcagctaattcaagtagcggacaatcgctggtactggtatcaaaggtaccaccacttgcttgtggacgggttcagttttccagcgataaccaggcaaatagccaacatttattgcacttggttgcgaggagagcctacgcccgcatcccccttcacgccattcgcagacgttgttgaggaataccaacagtatcgcgagagcgaagcgtggcaacgcgatgcggcattctgggcggagcaacgacggcaactaccgcctcccgcatccctatcacctgccccgctccccggccggtccgcgtcagccgacattctacggctaaagctggagttcacagatggtgaatttcgacagcttgctacacaactcagcggggtacaaaggacagacctagcgctcgctctggctgcattatggctaggacgactttgcaatcgaatggactacgcggcgggtttcatatttatgcgccggctcggcagcgcagcgttgaccgcaacgggtccagttttaaatgttcttcctttgggaatccacataggcaacccaagcttctctgagcttctcaccagggttcgcgaggtcgccttaggcgcgtatgcacaccaacatattccttttgagatgttagtagaggcactgcaaccagagcgaaaccttagccatactcctctcttccaagtgatgtttgtccttcagaatgcgcccgcgtcccaattagagttaaccgggatcaccgcaaacccaattaaggttaaatcaactaccacgaagttcgacctaactttaatcatgcaaaacacagctagcggattagtaggtgtttgggagtacaacacggatttattcgacgcgtcaacgattgagcgaatgacagggcactttgtaaccctcctcgagggcgttatcgccaatccacaacagccgatctctcaacttcctattttaactacagtggagcaacagcaacttttagtcgagtggaataacacgcaaaccgactaccccgctgataagtgtatacatcaattattcgaggaacaggtcgagcgcacaccagacgccgttgctgtcgtctttgggaatcagcaactcagctatcgagagatgcgcgaacaagtggttgcactcgccaatttattacgtgagcggggagtcaagccaggagactccgttgccgtggccttaccacgctctgttttcttaacccttgcactacacgcgattgtcgaggcaggtgccgcctggctacctcttgacacaggatatcctgacgatagattaaaaatgatgctcgaggatgcacggccttcccttctgatcacaacagacgatcaattaccccgcttcagtgacgtacctaatctgacctcactctgttacaacgctcccttgacgcctcaagggagcgcccctttacagctgtctcaacctcaccatactgcatatatcatctttacaagtggttctacgggacgccccaagggagtaatggttggtcagactgcgattgtaaatcgtctgttgtggatgcaaaaccactaccctttgacgggggaggacgttgtagcccaaaagactccttgctcgttcgatgtctcagtctgggagttcttttggccatttatagcaggggccaaattagttatggcggagccggaagcccaccgagacccacttgcgatgcagcaattctttgctgagtatggtgtcaccactacacatttcgtcccatcgatgttagcggccttcgtggcttctcttactccacaaacggctaggcaatcttgtgccacactaaagcaagtcttctgctccggcgaggcattacctgcagacttgtgccgggaatggcagcaactcacaggagctccattgcacaatctatacggaccgaccgaggccgcagtagacgtatcttggtatcctgcgtttggcgaggagttagcgcaagtaagaggttcgtcagtaccaataggataccccgtatggaacacggggcttcggatactggacgcgatgatgcatccggtcccaccaggagtcgcgggcgatttatacctgactgggatacagctggcccaaggttacctagggagacctgaccttacggcgtcgaggttcatagcggatccgtttgctccgggtgagcgcatgtaccgtacgggcgacgtcgcgcgatggctagataatggcgccgtagagtatcttggtagatcagacgatcagttaaagatacggggacaacgaatagagcttggggaaatagaccgggtaatgcaggctttgccagatgtcgagcaagcggtggcttcgtgtgctattgcgcgggaggacatacctgggaacaaacaccttgtagcgtacatagttcctcaagaggagcaaacatgcactgagcgatcgaggtccacacttacagtttcgttcgtccggagtttccttaaggagaaactccccgaatatatggtaccgagcgcaatagtgattctagacgctctccccctgactcctaatggaaagctagaccggcgggcgttacccgcccctgacctgcactcacaacttgagacaattattgctgcggctttctcgagcctgctcgggtgcgacgtacaagacgcggatgctgactttttcgcgctaggtggccattcgctgcttgccatgaagctagccgctcagctttcccgacaagtagcgcggcaggtgacaccaggccaagttatggtagcttcgactgtcgcaaagctcgcaacgatcatagacgcggagttagataaatacgtcgctccaaggaacccgataacatccggggaagataaccctatccccctatgtcaaggcgatggggaggagatgagcacatggctacgtcgttttggacccccagtcgaacatcgggccaggctagtgtgtttcccccacgcaggcgcagcggcggattcatacttagacctagcaagagcgttagcaccagagatcgatgttcatgctgttcaataccccggcaggcaagacagaagggacgaggagccattaggaaccgcaggtgaaattgcagatgaagtggcagcggtgctacgtgcgtcgggaggggatgggccttttgcacttttcggccacagtatgggcgccctcatcgcgtacgagacagcaaggcgattagagagggaaccgggagggggacccttacgtttattcgtgagcggacaaacagcgccacgtgtccatgaacgaagaactgatctgcccggtgacgatggactcgtggacgagcttaggcgacttggcacctccgaggcagcgctcgcagacgaagccctgctggctatgtctctcccggtgctcagggcggattatagggtgttaagatcctacgcttgggcggatggtcccccactacgcgccggtataactgccctctgcggtgatgcagacccactaactgcaacaggggatgcggaacgctggttacaacattccgtgattccgggtcggacacggacatttcccggtgggcatttttatttaggggaacaagtgaccgaggtggcaggggctgtccgtagagatttactgagagcagggttagcgggttga

SEQ ID NO: 13 - DNA, 12282 bp, Artificial Sequence
  ISC
atggttgccaaacatagtctggaaaacggtgtctttcacaagatgactgaaaacgagaaggaattgatccttcatttcaacaacactaagacagattaccctaagaacaagacgttgcatgaactttttgaagagcaggcaatgaaaaccccggatcacacagcactggtgttcggcgctcagagaatgacctacagggaactgaacgagaaggcgaatcaaacggcccgtctgttacgcgaaaaagggatcggacgtggcagcattgcggccattatcgcagatcgctcttttgaaatgatcatcggaatcatcggcatcctaaaggcaggcggtgcttatctgccgattgacccagaaaccccgaaagatcgtatcgcgttcatgctgagcgataccaaggcagctgtattgcttacgcagggaaaagcggccgatggcattgactgcgaagcggatatcgtgcaactggaccgtgaagccagcgatggtttttctaaagagccgctgagctctgttaatgatagtggcgacaccgcgtatattatctacacgagtggttccaccgggaccccgaaaggtgtgattaccccgcattattccgttatccgcgtggttcagaacactaactacatcgatatcacagaagacaacgtaatcctccaactatcaaactactcgttcgacggtagtgtgtttgatattttcggtgcgctcctaaacggggcctccctggtgatgatcgagaaagaagcactgttaaacattaatcgtctgggctcagctatcaatgaagagaaagtgagcgtgatgtttattaccacggcgctgttcaacatgattgccgatatccatgttgactgcctctcaaacctgcgtaaaattctgtttggcggcgaacgagcttcgatcccacatgtccgcaaggtactgaaccacgtcggtcgcgataaattaattcacgtatatggcccgactgaatcaacagtgtacgccacctattacttcataaacgaaattgatgacgaggcggaaactatccccataggtagcccgctggccaataccagcgtgctgattatggacgaagcaggcaaactggtcccaattggagtacctggcgaactgtgtatcgctggtgatgggttgtctaaaggttatcttaaccgtgaagagctcaccgcggaaaaatttatcccgcatccattcattcccggtgaacgtctgtacaagacgggcgaccttgccaaatggctcccagatggaaatatcgaatttataggccgcattgatcatcaggttaaaatccgtggctttcgaattgaactgggggagatcgaaagccgtttagaaatgcacgaggacatcaacgaaaccattgtgacggttcgcgaggatgaagagagccggccgtatatctgtgcatacattaccgctaatcgtgaaatttctcttgatgagctcaagggttttctgggggaaaaattacccgagtatatgatcccggcgtacttcgttaagctggataaactgccgttaacgaagaatggtaaagtcgaccggaaagccctgcctgaacccgatcgtactgcgggcgccgagaacgaatatgaggcaccgcgcaatgaaacagaagagaaactggcagctgtctggcaggacgtgttacatgttgaaaaagcaggcattcatgatcactttgctcaaatgggcggtcattcattgcacgcaatggaacttatcgctaagatcaaggaaaagatgaacgttgagatcccgctgcaccagttatttaagttggcgaccattaaagaactgtcggcgttcatcgaggccaatgtgccggttgagcagccatttgtgcatagccctgaagatcgctatcaaccgttcgcgctgaccgacgtacagcaagcctacctggtggggcgtcagccgggatttgccctgggcggtgttggctctcatttcttcgtcgaattcgagattgcagatttagacttgacccgcctggaaacggtttggaaccgtttaatagcacgccacgatatgttgcgtgctattgtacgtgacggtcagcaacaggtgctggaacagaccccgccatgggtgatcccggcgcatactctgcacacaccagaagaggcattacgagttagagaaaaactggctcatcaggtcttaaaccctgaagtctggcccgtatttgatctgcaagtgggctatgttgacggtatgccggcacgtctttggctctgcctagataatctattattggacgggctgagtatgcagattcttctcgccgaactggagcacggatatcgttaccctcaacagctactgcctcccctgccagttacctttcgtgattacttgcaacagccgagccttcagtctccgaacccagacagcctggcatggtggcaggctcaactggatgacatcccgccagcaccggctctcccactgcgttgtctgccacaggaagtggagactcctcgattcgcacggcttaatggcgctctcgattcaacacgttggcatcgtctgaaaaagcgcgcggccgacgcgcacctgactccgtcggccgtgttattgagtgtttggtccacagtcctgtcagcatggtcggctcagccggaatttactttaaacttgacacttttcgatcgtcgccctctgcatccccagattaatcaaatcttgggcgattttacctcacttatgcttctctcgtggcatccgggtgaatcctggctgcacagcgcgcagtctctgcaacagcgcttaagtcaaaacttgaatcaccgtgatgtttccgccattcgcgtcatgcggcagctggcgcaacagcaaaatgtcccggccgtacctatgcccgtggttttcacctctgcgctgggctttgaacaggataacttcctggcccggcgaaatctactgaaaccggtatggggtattagccagacgccgcaagtctggctggatcatcagatctatgaatctgagggcgaactgcgttttaactgggatttcgttgcagctctgtttccggcgggtcaggtggagcgtcagttcgaacaatactgcgcattattgaatcgcatggctgaggatgaaagcgggtggcagctcccgctggcggccctggtgcctcccgttaaacatgcgggtcagtgcgccgagcgcagcccgcgtgtttgtccagaacagtctcaaccgcacatcgcagctgatgaaagtactgtttccctgatatgtgacgcatttcgtgaggtcgtaggggaaagtgtgaccccggctgagaactttttcgaagcgggagccacgtccttaaatttggtacagctgcatgtgcttctccaacgtcacgaattttcaaccctgacgctactggatttattcacgcacccgtcgccagcggcccttgcggactatctcgcgggtgtcgccaccgtagaaaaaacgaagaggcctcggcccgtgagaaggcgtcagcgccggatccagcacttgcccttagtagctgcgcaacctggaatatggatggccgagaagttatctgaactaccatcagcgtggagcgtagcgcattacgtggagctcactggtgaggttgactcgcctcttttggccagggcggtagtggctggccttgcacaagctgacaccttaagaatgcgtttcacagaggataatggggaagtttggcaatgggtagacgatgcgttaacatttgagttaccggaaatcatagacctgcgcactaacatagaccctcacgggacagctcaggccttgatgcaagcggacctgcaacaggacctacgtgtggattcggggaagcctctggtcttccatcagctaattcaagtagcggacaatcgctggtactggtatcaaaggtaccaccacttgcttgtggacgggttcagttttccagcgataaccaggcaaatagccaacatttattgcacttggttgcgaggagagcctacgcccgcatcccccttcacgccattcgcagacgttgttgaggaataccaacagtatcgcgagagcgaagcgtggcaacgcgatgcggcattctgggcggagcaacgacggcaactaccgcctcccgcatccctatcacctgccccgctccccggccggtccgcgtcagccgacattctacggctaaagctggagttcacagatggtgaatttcgacagcttgctacacaactcagcggggtacaaaggacagacctagcgctcgctctggctgcattatggctaggacgactttgcaatcgaatggactacgcggcgggtttcatatttatgcgccggctcggcagcgcagcgttgaccgcaacgggtccagttttaaatgttcttcctttgggaatccacataggcaacccaagcttctctgagcttctcaccagggttcgcgaggtcgccttaggcgcgtatgcacaccaacatattccttttgagatgttagtagaggcactgcaaccagagcgaaaccttagccatactcctctcttccaagtgatgtttgtccttcagaatgcgcccgcgtcccaattagagttaaccgggatcaccgcaaacccaattaaggttaaatcaactaccacgaagttcgacctaactttaatcatgcaaaacacagctagcggattagtaggtgtttgggagtacaacacggatttattcgacgcgtcaacgattgagcgaatgacagggcactttgtaaccctcctcgagggcgttatcgccaatccacaacagccgatctctcaacttcctattttaactacagtggagcaacagcaacttttagtcgagtggaataacacgcaaaccgactaccccgctgataagtgtatacatcaattattcgaggaacaggtcgagcgcacaccagacgccgttgctgtcgtctttgggaatcagcaactcagctatcgagagatgcgcgaacaagtggttgcactcgccaatttattacgtgagcggggagtcaagccaggagactccgttgccgtggccttaccacgctctgttttcttaacccttgcactacacgcgattgtcgaggcaggtgccgcctggctacctcttgacacaggatatcctgacgatagattaaaaatgatgctcgaggatgcacggccttcccttctgatcacaacagacgatcaattaccccgcttcagtgacgtacctaatctgacctcactctgttacaacgctcccttgacgcctcaagggagcgcccctttacagctgtctcaacctcaccatactgcatatatcatctttacaagtggttctacgggacgccccaagggagtaatggttggtcagactgcgattgtaaatcgtctgttgtggatgcaaaaccactaccctttgacgggggaggacgttgtagcccaaaagactccttgctcgttcgatgtctcagtctgggagttcttttggccatttatagcaggggccaaattagttatggcggagccggaagcccaccgagacccacttgcgatgcagcaattctttgctgagtatggtgtcaccactacacatttcgtcccatcgatgttagcggccttcgtggcttctcttactccacaaacggctaggcaatcttgtgccacactaaagcaagtcttctgctccggcgaggcattacctgcagacttgtgccgggaatggcagcaactcacaggagctccattgcacaatctatacggaccgaccgaggccgcagtagacgtatcttggtatcctgcgtttggcgaggagttagcgcaagtaagaggttcgtcagtaccaataggataccccgtatggaacacggggcttcggatactggacgcgatgatgcatccggtcccaccaggagtcgcgggcgatttatacctgactgggatacagctggcccaaggttacctagggagacctgaccttacggcgtcgaggttcatagcggatccgtttgctccgggtgagcgcatgtaccgtacgggcgacgtcgcgcgatggctagataatggcgccgtagagtatcttggtagatcagacgatcagttaaagatacggggacaacgaatagagcttggggaaatagaccgggtaatgcaggctttgccagatgtcgagcaagcggtggcttcgtgtgctattgcgcgggaggacatacctgggaacaaacaccttgtagcgtacatagttcctcaagaggagcaaacatgcactgagcgatcgaggtccacacttacagtttcgttcgtccggagtttccttaaggagaaactccccgaatatatggtaccgagcgcaatagtgattctagacgctctccccctgactcctaatggaaagctagaccggcgggcgttacccgcccctgacctgcactcacaacttgagacaattattgctgcggctttctcgagcctgctcgggtgcgacgtacaagacgcggatgctgactttttcgcgctaggtggccattcgctgcttgccatgaagctagccgctcagctttcccgacaagtagcgcggcaggtgacaccaggccaagttatggtagcttcgactgtcgcaaagctcgcaacgatcatagacgcggagttagataaatacgtcgctccaaggaacccgatactgccagtagaacagccttttgtgcactcaccggaagagcggtatcgaccattcgcgttaacggatgttcagcaagcctacctggtcgggcgccagccgggatttgccctgggcggtgtaggctcgcatttcttcgtggaattcgagatcgcagatctcgacatacaccgcctggaaaaagtgtggaaccgtttaattgcacgtcatgatatgttgcgcgctgtggttcgtgacggtcagcaacgtgtactggaacagaccccgccatgggtcataccagcacatattcttcacagtcctgaagaggcattacaggttcgtgatcgtttagctcaccaagtgttgaaccccgaagtctggccggtatttgatctgcaggtgggcttcgttgacggtatgccggcccgtttatggttgtgccttgataacctgttattggacgggctgagcatgcagattcttctctctgaactggagcatggatatcgctacccacagcaactccctcccccgttgccgatcacttttcgcgattatcttcagcaaccggcactccgtaccccaaatcctgactcattggcttggtggcagacgcaactggatgacatcccacctgcgcccgccctcccgctacgttgtctgcctcaagatgttgaaaccccgcgtttcgcgcgtctgtacggcgcaatggattctgctcgttggcgtcgcctgaaacagcgtgcggccgacgcacatctgactccgtcagctgtcctactgagcgtatggtctacagtgctggcagcttggtcggcgcagccggattttactctcaacctgacattattcgaccggcgaccactgcaccctcagattaatcaaatccttggcgattttacctcactgatgttattgtcgtggcatccgggtgagagttggctgcagtccgcgcgtcttctccagcaacgcctttcagaatcgctcaaccaccgtgatgttagcgccattcgcgtcatgcggcagctggcgagaaggcaaaatgtcccggccgtacccatgccggtcgtatttacctctgcgctggggtttgaacaggataacttcctggcccgtcgcaatctactgaaaccggtgtggggtatcagtcagacgccgcaagtttggctggaccatcaggtctatgaatccgagggcgaactgcgttttaactgggatttcgttgcggccctgtttccggacggtcaagtggaacgtcagttcgcgcaatactgcgccttattgaatcgcatggcagaagatgacagctcttggcagttgccgcttgctgatctggtgcccccgttaaaagtgaccgagcggcgagcgagaaggctgcgtccagaacgcgcccagcctcgtattgcagctgataagagttccgttagtctgatctgtgacacttttcgtgaggtggttggggaacccgtggcaccggctgagaactttttcgaagcgggagccacatccctcaatctggttcagctgcatgtccttctccaacgtcacgaatttgcgaccttaacgctactggatttgttcacccatccaagccctgttgcattggctaactatcttgcgggtgtggccctggaagagaaaacgaagcgcgtgcggccggttcggcgaagacagcgtcgcattggagagccgttcccactcgctcctatgcaacacgccatgtgggtagggcggcacgaccaccaacagctcgggggagtagcaggccatctttacgtcgagtttgacggcgcgagagtcgaccccgatcggttgcgcgctgccgccacccgactcgccctacgtcaccctatgttgagggtacagttcctgcctgacggtacacaaaggatccctccagccgcaggctcgcgggactttcccatcagcgttgcggatcttcgtcacgtagctcctgacgttgtcgatcaacggctcgcgggtattagagacgcaaagtctcatcaacagcttgatggagctgtcttcgagttggctctcactctcctgccaggtgaaaggacgaggctgcacgtcgacctggatatgcaagctgctgacgccatgagctacaggatcctgctggcggacttggccgcactatacgacgggagagagcccccagcactcggttacacgtatagagagtaccgccaggctattgaggccgaggaaacattaccgcaacctgttcgcgacgccgatagggactggtgggcacaaagaataccacagcttccagacccgcccgcactaccgacgcgtgccggtggtgagagagatcgccggcgctcgaccagaagatggcactggttagacccacaaacaagggacgccctcttcgcacgagcacgagctcgtggcatcacacctgcaatgacacttgcggccgcgtttgcaaatgtcctcgcgagatggtccgcctcttcccggttcttactcaatttgccccttttctcgcgccaagcgttgcatccggacgtagacctcttggtaggtgacttcacatcgtcgctgctgttagatgttgacctaggagatacagtgtctaatcttgctcggaagaaccaactgacttttacggaggactgggaacaccggcattggagcggagtagagttgctgcgagaactcaaaaggcaacagcgttacccacacggagcgcccgtggtgttcacttctaatcttgggcgcagtttatattcttctcgggcggagtcccccttgggagagcctgaatggggaatttcgcaaacaccacaggtttggatcgaccatttagcatttgagcaccatggggaagtatggctccaatgggactcgaacgacgccctcttcccacctgctttagtcgagactctgtttgacgcgtactgtcaattgataaaccagctgtgcgacgatgaatccgcatggcaaaagcccttcgcggacatgatgccggcgagtcagcgtgctattcgtgagcgggtgaacgctaccggcgcaccgatcccggagggcctcttacacgaagggatttttcggatcgctcttcaacagcctcaggcgctcgcggtaacggacatgcggtaccaatggaatagttatcgagagatgcgggaacaggtcgtcgctttggcaaatctactccgagagcgcggggtcaagccaggggactcagtcgctgtagcgcttcctcggtcagtcttcctaaccttggctctccacgcgatcgtagaggcgggtgcggcgtggcttcccctcgacacgggctatccggacgatcggttgaagatgatgctagaggatgcacgaccctctctgttaatcacaaccgacgatcaactccccaggttctcagacgtccctaatcttaccagtctatgttacaacgcgcccctcactccacaaggcagcgctcctttacaacttagtcagccgcaccataccgcttatatcatttttacgtccggttccacgggcaggccgaagggtgtaatggtgggccaaactgcaatagtgaatagactattgtggatgcaaaaccactacccgcttaccggggaggacgtagtggctcaaaagactccctgctctttcgatgtcagcgtgtgggagttcttttggccttttatagccggcgctaaattggttatggcggagccggaagctcaccgagaccctttggccatgcaacagttctttgcagagtatggagtcacaacgacgcatttcgtcccatcgatgttagccgcgttcgtagcatcattgacgccacaaactgcgagacagtcatgtgccacacttaagcaagtcttctgctctggtgaggcccttcctgcggacctatgtcgggaatggcaacagcttactggagcccccttgcacaatctttacgggccgactgaggccgcagttgacgtatcgtggtatccagcgttcggggaggagctagcccaagtgcgagggtctagtgttccaattggatacccggtgtggaacacagggttaaggatcctcgacgccatgatgcatccggtaccaccaggtgtcgctggggatttgtacctgactggcattcaactggcacagggttatctagggcggcctgacttaacagctagccgattcatagcagatccattcgctcccggagagcggatgtaccgaacaggcgacgtggcacgctggttagataatggcgctgtcgagtatcttgggcggtcagacgatcagttaaagatacgtggacaacggattgagcttggtgaaatagaccgagttatgcaggcactaccagatgtcgagcaagccgtagcctcttgtgccattgcgcgagaagacattcccgggaacaagcacttggttgcgtacatagtgccgcaagaggagcagacctgcacagagcggtcacgttcaactctcacagtttccttcgtccgttctttcttaaaggagaaactaccagaatatatggtaccgtccgcgatcgtgatattagacgctctgccactcacgccaaatggaaagttggatagaagagctctgcctgctcctgacttgcactcgcaactcctggataaatacgttgctcccagaaacccaatagagactattatcgcggcagcattctcttcattgcttggatgcgacgtccaagatgcggacgcagatttctttgcgctcgggggccatagtctattggccatgaagctcgcagcgcaattgtcgagacaggtagcacggcaagtaacgcccgggcaagtcatggtcgcctcgacagtcgcgaaactcgcgaccattatcgacgctgagacatccggggaagataaccctatccccctatgtcaaggcgatggggaggagatgagcacatggctacgtcgttttggacccccagtcgaacatcgggccaggctagtgtgtttcccccacgcaggcgcagcggcggattcatacttagacctagcaagagcgttagcaccagagatcgatgttcatgctgttcaataccccggcaggcaagacagaagggacgaggagccattaggaaccgcaggtgaaattgcagatgaagtggcagcggtgctacgtgcgtcgggaggggatgggccttttgcacttttcggccacagtatgggcgccctcatcgcgtacgagacagcaaggcgattagagagggaaccgggagggggacccttacgtttattcgtgagcggacaaacagcgccacgtgtccatgaacgaagaactgatctgcccggtgacgatggactcgtggacgagcttaggcgacttggcacctccgaggcagcgctcgcagacgaagccctgctggctatgtctctcccggtgctcagggcggattatagggtgttaagatcctacgcttgggcggatggtcccccactacgcgccggtataactgccctctgcggtgatgcagacccactaactgcaacaggggatgcggaacgctggttacaacattccgtgattccgggtcggacacggacatttcccggtgggcatttttatttaggggaacaagtgaccgaggtggcaggggctgtccgtagagatttactgagagcagggttagcgggttga

SEQ ID NO: 14 - DNA, 13605 bp, Artificial Sequence
  ISH
atggttgccaaacatagtctggaaaacggtgtctttcacaagatgactgaaaacgagaaggaattgatccttcatttcaacaacactaagacagattaccctaagaacaagacgttgcatgaactttttgaagagcaggcaatgaaaaccccggatcacacagcactggtgttcggcgctcagagaatgacctacagggaactgaacgagaaggcgaatcaaacggcccgtctgttacgcgaaaaagggatcggacgtggcagcattgcggccattatcgcagatcgctcttttgaaatgatcatcggaatcatcggcatcctaaaggcaggcggtgcttatctgccgattgacccagaaaccccgaaagatcgtatcgcgttcatgctgagcgataccaaggcagctgtattgcttacgcagggaaaagcggccgatggcattgactgcgaagcggatatcgtgcaactggaccgtgaagccagcgatggtttttctaaagagccgctgagctctgttaatgatagtggcgacaccgcgtatattatctacacgagtggttccaccgggaccccgaaaggtgtgattaccccgcattattccgttatccgcgtggttcagaacactaactacatcgatatcacagaagacaacgtaatcctccaactatcaaactactcgttcgacggtagtgtgtttgatattttcggtgcgctcctaaacggggcctccctggtgatgatcgagaaagaagcactgttaaacattaatcgtctgggctcagctatcaatgaagagaaagtgagcgtgatgtttattaccacggcgctgttcaacatgattgccgatatccatgttgactgcctctcaaacctgcgtaaaattctgtttggcggcgaacgagcttcgatcccacatgtccgcaaggtactgaaccacgtcggtcgcgataaattaattcacgtatatggcccgactgaatcaacagtgtacgccacctattacttcataaacgaaattgatgacgaggcggaaactatccccataggtagcccgctggccaataccagcgtgctgattatggacgaagcaggcaaactggtcccaattggagtacctggcgaactgtgtatcgctggtgatgggttgtctaaaggttatcttaaccgtgaagagctcaccgcggaaaaatttatcccgcatccattcattcccggtgaacgtctgtacaagacgggcgaccttgccaaatggctcccagatggaaatatcgaatttataggccgcattgatcatcaggttaaaatccgtggctttcgaattgaactgggggagatcgaaagccgtttagaaatgcacgaggacatcaacgaaaccattgtgacggttcgcgaggatgaagagagccggccgtatatctgtgcatacattaccgctaatcgtgaaatttctcttgatgagctcaagggttttctgggggaaaaattacccgagtatatgatcccggcgtacttcgttaagctggataaactgccgttaacgaagaatggtaaagtcgaccggaaagccctgcctgaacccgatcgtactgcgggcgccgagaacgaatatgaggcaccgcgcaatgaaacagaagagaaactggcagctgtctggcaggacgtgttacatgttgaaaaagcaggcattcatgatcactttgctcaaatgggcggtcattcattgcacgcaatggaacttatcgctaagatcaaggaaaagatgaacgttgagatcccgctgcaccagttatttaagttggcgaccattaaagaactgtcggcgttcatcgaggccaatgtgccggttgagcagccatttgtgcatagccctgaagatcgctatcaaccgttcgcgctgaccgacgtacagcaagcctacctggtggggcgtcagccgggatttgccctgggcggtgttggctctcatttcttcgtcgaattcgagattgcagatttagacttgacccgcctggaaacggtttggaaccgtttaatagcacgccacgatatgttgcgtgctattgtacgtgacggtcagcaacaggtgctggaacagaccccgccatgggtgatcccggcgcatactctgcacacaccagaagaggcattacgagttagagaaaaactggctcatcaggtcttaaaccctgaagtctggcccgtatttgatctgcaagtgggctatgttgacggtatgccggcacgtctttggctctgcctagataatctattattggacgggctgagtatgcagattcttctcgccgaactggagcacggatatcgttaccctcaacagctactgcctcccctgccagttacctttcgtgattacttgcaacagccgagccttcagtctccgaacccagacagcctggcatggtggcaggctcaactggatgacatcccgccagcaccggctctcccactgcgttgtctgccacaggaagtggagactcctcgattcgcacggcttaatggcgctctcgattcaacacgttggcatcgtctgaaaaagcgcgcggccgacgcgcacctgactccgtcggccgtgttattgagtgtttggtccacagtcctgtcagcatggtcggctcagccggaatttactttaaacttgacacttttcgatcgtcgccctctgcatccccagattaatcaaatcttgggcgattttacctcacttatgcttctctcgtggcatccgggtgaatcctggctgcacagcgcgcagtctctgcaacagcgcttaagtcaaaacttgaatcaccgtgatgtttccgccattcgcgtcatgcggcagctggcgcaacagcaaaatgtcccggccgtacctatgcccgtggttttcacctctgcgctgggctttgaacaggataacttcctggcccggcgaaatctactgaaaccggtatggggtattagccagacgccgcaagtctggctggatcatcagatctatgaatctgagggcgaactgcgttttaactgggatttcgttgcagctctgtttccggcgggtcaggtggagcgtcagttcgaacaatactgcgcattattgaatcgcatggctgaggatgaaagcgggtggcagctcccgctggcggccctggtgcctcccgttaaacatgcgggtcagtgcgccgagcgcagcccgcgtgtttgtccagaacagtctcaaccgcacatcgcagctgatgaaagtactgtttccctgatatgtgacgcatttcgtgaggtcgtaggggaaagtgtgaccccggctgagaactttttcgaagcgggagccacgtccttaaatttggtacagctgcatgtgcttctccaacgtcacgaattttcaaccctgacgctactggatttattcacgcacccgtcgccagcggcccttgcggactatctcgcgggtgtcgccaccgtagaaaaaacgaagaggcctcggcccgtgagaaggcgtcagcgccggatccagcacttgcccttagtagctgcgcaacctggaatatggatggccgagaagttatctgaactaccatcagcgtggagcgtagcgcattacgtggagctcactggtgaggttgactcgcctcttttggccagggcggtagtggctggccttgcacaagctgacaccttaagaatgcgtttcacagaggataatggggaagtttggcaatgggtagacgatgcgttaacatttgagttaccggaaatcatagacctgcgcactaacatagaccctcacgggacagctcaggccttgatgcaagcggacctgcaacaggacctacgtgtggattcggggaagcctctggtcttccatcagctaattcaagtagcggacaatcgctggtactggtatcaaaggtaccaccacttgcttgtggacgggttcagttttccagcgataaccaggcaaatagccaacatttattgcacttggttgcgaggagagcctacgcccgcatcccccttcacgccattcgcagacgttgttgaggaataccaacagtatcgcgagagcgaagcgtggcaacgcgatgcggcattctgggcggagcaacgacggcaactaccgcctcccgcatccctatcacctgccccgctccccggccggtccgcgtcagccgacattctacggctaaagctggagttcacagatggtgaatttcgacagcttgctacacaactcagcggggtacaaaggacagacctagcgctcgctctggctgcattatggctaggacgactttgcaatcgaatggactacgcggcgggtttcatatttatgcgccggctcggcagcgcagcgttgaccgcaacgggtccagttttaaatgttcttcctttgggaatccacataggcaacccaagcttctctgagcttctcaccagggttcgcgaggtcgccttaggcgcgtatgcacaccaacatattccttttgagatgttagtagaggcactgcaaccagagcgaaaccttagccatactcctctcttccaagtgatgtttgtccttcagaatgcgcccgcgtcccaattagagttaaccgggatcaccgcaaacccaattaaggttaaatcaactaccacgaagttcgacctaactttaatcatgcaaaacacagctagcggattagtaggtgtttgggagtacaacacggatttattcgacgcgtcaacgattgagcgaatgacagggcactttgtaaccctcctcgagggcgttatcgccaatccacaacagccgatctctcaacttcctattttaactacagtggagcaacagcaacttttagtcgagtggaataacacgcaaaccgactaccccgctgataagtgtatacatcaattattcgaggaacaggtcgagcgcacaccagacgccgttgctgtcgtctttgggaatcagcaactcagctatcgagagatgcgcgaacaagtggttgcactcgccaatttattacgtgagcggggagtcaagccaggagactccgttgccgtggccttaccacgctctgttttcttaacccttgcactacacgcgattgtcgaggcaggtgccgcctggctacctcttgacacaggatatcctgacgatagattaaaaatgatgctcgaggatgcacggccttcccttctgatcacaacagacgatcaattaccccgcttcagtgacgtacctaatctgacctcactctgttacaacgctcccttgacgcctcaagggagcgcccctttacagctgtctcaacctcaccatactgcatatatcatctttacaagtggttctacgggacgccccaagggagtaatggttggtcagactgcgattgtaaatcgtctgttgtggatgcaaaaccactaccctttgacgggggaggacgttgtagcccaaaagactccttgctcgttcgatgtctcagtctgggagttcttttggccatttatagcaggggccaaattagttatggcggagccggaagcccaccgagacccacttgcgatgcagcaattctttgctgagtatggtgtcaccactacacatttcgtcccatcgatgttagcggccttcgtggcttctcttactccacaaacggctaggcaatcttgtgccacactaaagcaagtcttctgctccggcgaggcattacctgcagacttgtgccgggaatggcagcaactcacaggagctccattgcacaatctatacggaccgaccgaggccgcagtagacgtatcttggtatcctgcgtttggcgaggagttagcgcaagtaagaggttcgtcagtaccaataggataccccgtatggaacacggggcttcggatactggacgcgatgatgcatccggtcccaccaggagtcgcgggcgatttatacctgactgggatacagctggcccaaggttacctagggagacctgaccttacggcgtcgaggttcatagcggatccgtttgctccgggtgagcgcatgtaccgtacgggcgacgtcgcgcgatggctagataatggcgccgtagagtatcttggtagatcagacgatcagttaaagatacggggacaacgaatagagcttggggaaatagaccgggtaatgcaggctttgccagatgtcgagcaagcggtggcttcgtgtgctattgcgcgggaggacatacctgggaacaaacaccttgtagcgtacatagttcctcaagaggagcaaacatgcactgagcgatcgaggtccacacttacagtttcgttcgtccggagtttccttaaggagaaactccccgaatatatggtaccgagcgcaatagtgattctagacgctctccccctgactcctaatggaaagctagaccggcgggcgttacccgcccctgacctgcactcacaacttgagacaattattgctgcggctttctcgagcctgctcgggtgcgacgtacaagacgcggatgctgactttttcgcgctaggtggccattcgctgcttgccatgaagctagccgctcagctttcccgacaagtagcgcggcaggtgacaccaggccaagttatggtagcttcgactgtcgcaaagctcgcaacgatcatagacgcggagttagataaatacgtcgctccaaggaacccgatacctggaattggggcgctagttcccgctcccgtggtaatcgcagcaggccgtacggaggaaccaattgccatagtatccatggcttgccggttacccggtggtgtgaataccccacagagactatgggaattattacgtgaagggggagaaaccctcagtggcttccctaccgaccgagggtgggacctcgcgaggttgcatcacccagacccagacaaccccggtacgtcatacgttgataaagggggattcctggacgatgcggcagggtttgacgcagaatttttcggtgtgagccccagagaagcagcggctatggacccgcagcagagattactcctcgaaaccagctgggagttagtcgagaatgcagggattgatccacatagcctaagggggaccgccactggtgtcttcctcggcgttgccaagtttgggtatggcgaggatacggcagctgccgaagacgtcgaggggtactctgtcactggtgtagccccggcagtggcgtcgggcagaattagttacacgatggggttggaagggccgtctatttcggttgataccgcctgttcctccagtctggttgcactccaccttgcagtcgagtcgctccggaaaggagaaagcagtatggccgtggtcgggggagcggcggtgatggccacaccgggtgtgtttgtggatttttcccgacagagagccttggccgcggatgggcgttcaaaggcgttcggagcaggtgcagacgggtttggatttagcgaaggtgtgacactggttctcctagaaagattaagtgaagcccggcgtaacggccatgaggtgctggcagttgttagaggttccgcattaaaccaggacggggcttcgaacgggctgagcgccccctcgggcccggcacagagaagagtgatacgccaagcactcgaatcgtgtggcctagaaccaggtgacgttgacgcggtggaagcgcacgggacaggaactgcgttaggggacccgatagaagcaaacgccttgctggacacttatggtagagatcgtgatgcggatcgacccctctggttaggaagtgttaagtcaaatataggacacactcaggcagcggcgggagtaactgggctgctcaaagtagtcctagccttacgcaatggggaactacccgccaccctacatgtcgaggaaccgacaccgcatgtggattggtcgagcgggggagttgctctcttggcgggtaatcagccgtggcgaagaggtgaacgaacccgtagagccgccgtgtccgcattcgggatcagtggtacgaacgcgcacgtgattgtggaagaagctccacaagaggtgagaccagcgcccggtcaaggactctcgcccgcggtgtcaaccttggtagtggcgggtaaaactatgcagcgtgtttcggcaaccgccggtatgctcgcagattggatggaaggcccaggtgcagatgtggcgctggcggacgtggcgcacacgttaaatcatcaccgttcacggcaaccaaagttcggtacggtggtggccagggaccggacacaggcaatcgccggactaagagcgctggcggcgggtcagcacgccccaggggttgttaaccctgctgaaggaagtccaggtccagggacggtgttcgtgtttcctggccaggggtcccagcgtgcaggcatgggggaggagttggctgcggctttccccgtgtttgccagaatccaccagcaagtgtgggatttactcgatgttcctgatctcgacgttaacgaaacggggtacgcacaaccagcactcttcgcactccaagtggcgctgtttgggctcctcgaatcatggggagtacggccggatgccgtggtcgggcatagtgtaggggaattagcggcagggtacgtttccgggctttggagtcttgaggatgcttgcacgctcgtgtcggcgagagcccgtctaatgcaagccttaccggcaggtggtgttatggcggcagttccagtgtccgaagacgaagcacgggctgtgttgggggaaggagtcgaaatagctgcggtcaacggtccgtcgagcgtggttctaagcggtgatgaagcagcagtgctccaggccgcggaagggttaggcaagtggacgcgattaccgacctcgcatgcattccattctgctcgtatggaaccaatgctggaagagtttagagcagtggcggaaggtctaacatacaggactccccaggtggcaatggccgccggagaccaggttatgaccgctgaatactgggtgcgtcaggttagggatacagttcgttttggcgagcaagttgcctcgttcgaggatgctgtattcgtggaattgggagcagatcgctctcttgcacggctagtcgatggtatcgcgatgttgcacggggatcatgaggcacaggctggtatgcggagagaacaacccttgcccttaggtttacgaagattgctaaccgacctgcataacgctggtgctgccgtcgattttagtgttttgtgcccacaaggtcgtctggttgacgcaccgttaccagcctggtcacaccggtttctcttctatgaccgggaaggagtggacaatagatcaccagggggaagcacagtggcggtccacccgcttttactagccgcggtggatgtgccgggccacggtggagcggttttcacgggtagactctcgactgacgagcaaccgtggttagcggagcacgttgtcgggggaagaaccctagttcctggttctgttttagtcgatctagccttagcggcaggcgaagacgtagggctaccggtgttagaagaattagtattgcagaggccgctggtgcttgccggcgcgggagcactcctacggatgtcggtcggggcaccagacgagagcggtagaagaactatcgatgttcacgcagctgaagacgtcgccgatttagcagatgcccaatggtcccagcacgccaccgggactttagcccaaggggtagcggcggggcccagggacacagagcaatggcccccagaggatgccgtccggattccattagacgaccattatgatggtctcgcggaacagggttatgagtacggtccgtcgtttcaggcgctagtggcctacgtggcggaggatgcgactgcgacaatgttagcggaagtcgcgcttccgggcagcattagatcgcaacaaggtctatacgccatccatcccgcactgctggacgcttgttttcaatctgtcggagcccacccagacagtcaatccgtcgggtcaggtctactcgtacccctcggtgttcggagagttcgtgcgtacgcacccgtaaggaccgcccgttattgttacacccgcgtcacgaaagttgaactagctggggttgaggccgacatcgacgttctggatgctcacggcacagtgcttctagccgtgtgcggtcttcgtatcgggaccggagtgagcgagagggacaaacacaacagagttctcaatgagcgcctactcaccatcgaatggcatcagcgtgaactaccagaaatggacccctcgggtgccgggaagtggctcctaatctcggactgtgcagcatccgatgtcaccgctacacgactggctgatgccttccgggagcacagcgctgcgtgcactaccatgcggtggccacttcacgatgatcaactagcagccgccgaccaactccgggaccaggtgggttcagatgagttttctggcgtggtagtactaacagggccaaacacagggacccctcatcagggttccgcagaccgtggcgccgagtacgttaggcggttagttggaatcgctcgtgaacttagcgatcttcccggagcggttccccgtatgtatgtcgtcacaaggggagcgcagagagtccttgccgatgattgtgttaatttagaacagggagggctcagaggtctgctgaggaccatcggtgctgagcacccacatctccgcgccacccaaattgatgttgatgagcagacaggagtagagcagctggcgcgacaactcctagctacatcggaggaagacgagacagcctggagggacaacgaatggtacgttgcgaggttatgccccacacccctgaggccacaggaacgtaggacaatagtggcggaccatcaacagtctggtatgcggttacaaatacgtacgcccggtgcaatcgatagtgtggcctttgaacccgcacccgatgtagagcaacccttacgggcgggtgaagttcgggttgacgttagagcaaccggtgttaatttccgtgacgttctactcgctctcgggatgtatccccagaaagctgacatggggacagaagcagctggtgttgtaacagcagtgggacctgatgtcgatgcgtttgcgcctggtgatagagttctagggctattccaaggggcatttgctccaattgcggtgactgaccatcgtttactggcacgggtgccagacgggtggtcagatgccgatgcggcggcggtgccaatagcttacacgacagcacattatgcgctgcacgacctggcggggttgcgggcggggcaatctgtcctgatacacgcggcagcgggtggtgttggtatggccgctgttgcactggcacggagggccggcgcagaagttctggctaccgcaggacctgcaaaacacggtacgctacgggcattagggctagatgatgaacacatcgcttcgagtcgggagaccgggttcgcgcgtaagttccgagagcggactgggggacgaggagtggacgtcgttctaaacagcttgaccggcgaactattagacgagtccgcggatctcctcgcggaggacggagtcttcgtggaaatgggaaagactgatctgcgcgatgcaggggactttcgtgggcgctacgccccgtttgatctaggggaagcaggcgatgacaggctcggggaaattctacgtgaggtggtgggactgctcggtgcaggggaactcgaccgactccctgttagcgcgtgggaattggggataccccagacggggaagtcgttagtgacgctgccacccgaacaagcgcaagttttcagaccagacggcactgtattgatcaccgggggaacgggaacgttaggtcggctgctggcccgtcatctggttacagagcacggggtgcgtcacctgctgctagtgtcgaggagaggagcagatgcccctggatcggacgagctgagggccgaaatcgaggatctcggagcatcagcggaaattgcagcatgtgatacagccgatcgagacgctctcagcgcgttgctagatggactgccgaggccactgaccggagtagttcacgccgcgggagtcctcgctgacggtctggttacatccatcgacgagcccgcagtcgaacaagttctccgtgcaaaagttgatgcggcctggaacctgcacgagctaactgcgaacaccggtctcagctttttcgtgctgttctcgtcagccgcaagtgtgttagcggggccggggcagggagtatatgcggcagcgaacgaatctttaaacgctctggccgctctgcgtaggactaggggtttacccgcaaaagcattgggatggggattatgggcgatagggcgtgcaatagcatttgccgagcagaccggtgacgcaatcgccccggaggaaggcgcgtacgccttcgagacactactcagacataacagggcgtactcgggttacgctcccgtgatagggtcaccatggctgactgcgttcgcccaacattcgccctttgcggagaagttccagtccctggggcaaaatagatccgggacgtctaagtttctggcagaattagtcgatctgccaagagaagaatggccagatcggttacgtcgtctattagaactggtgaggtctcatgctgccgcagtttcggggtatggatcggcagaccaattaccagaaagaaaagcattcaaagacctcggattcgattcactggcagcagtcgaactaagaaatcgtctagggaccgcgacaggcgtccggctgcccagtactctggtgttcgaccacccaaccccacttgcggttgcggaacatctacgtgatcgtctaacatccggggaagataaccctatccccctatgtcaaggcgatggggaggagatgagcacatggctacgtcgttttggacccccagtcgaacatcgggccaggctagtgtgtttcccccacgcaggcgcagcggcggattcatacttagacctagcaagagcgttagcaccagagatcgatgttcatgctgttcaataccccggcaggcaagacagaagggacgaggagccattaggaaccgcaggtgaaattgcagatgaagtggcagcggtgctacgtgcgtcgggaggggatgggccttttgcacttttcggccacagtatgggcgccctcatcgcgtacgagacagcaaggcgattagagagggaaccgggagggggacccttacgtttattcgtgagcggacaaacagcgccacgtgtccatgaacgaagaactgatctgcccggtgacgatggactcgtggacgagcttaggcgacttggcacctccgaggcagcgctcgcagacgaagccctgctggctatgtctctcccggtgctcagggcggattatagggtgttaagatcctacgcttgggcggatggtcccccactacgcgccggtataactgccctctgcggtgatgcagacccactaactgcaacaggggatgcggaacgctggttacaacattccgtgattccgggtcggacacggacatttcccggtgggcatttttatttaggggaacaagtgaccgaggtggcaggggctgtccgtagagatttactgagagcagggttagcgggttga

SEQ ID NO: 15 - DNA, 11952 bp, Artificial Sequence
  ISO
atggttgccaaacatagtctggaaaacggtgtctttcacaagatgactgaaaacgagaaggaattgatccttcatttcaacaacactaagacagattaccctaagaacaagacgttgcatgaactttttgaagagcaggcaatgaaaaccccggatcacacagcactggtgttcggcgctcagagaatgacctacagggaactgaacgagaaggcgaatcaaacggcccgtctgttacgcgaaaaagggatcggacgtggcagcattgcggccattatcgcagatcgctcttttgaaatgatcatcggaatcatcggcatcctaaaggcaggcggtgcttatctgccgattgacccagaaaccccgaaagatcgtatcgcgttcatgctgagcgataccaaggcagctgtattgcttacgcagggaaaagcggccgatggcattgactgcgaagcggatatcgtgcaactggaccgtgaagccagcgatggtttttctaaagagccgctgagctctgttaatgatagtggcgacaccgcgtatattatctacacgagtggttccaccgggaccccgaaaggtgtgattaccccgcattattccgttatccgcgtggttcagaacactaactacatcgatatcacagaagacaacgtaatcctccaactatcaaactactcgttcgacggtagtgtgtttgatattttcggtgcgctcctaaacggggcctccctggtgatgatcgagaaagaagcactgttaaacattaatcgtctgggctcagctatcaatgaagagaaagtgagcgtgatgtttattaccacggcgctgttcaacatgattgccgatatccatgttgactgcctctcaaacctgcgtaaaattctgtttggcggcgaacgagcttcgatcccacatgtccgcaaggtactgaaccacgtcggtcgcgataaattaattcacgtatatggcccgactgaatcaacagtgtacgccacctattacttcataaacgaaattgatgacgaggcggaaactatccccataggtagcccgctggccaataccagcgtgctgattatggacgaagcaggcaaactggtcccaattggagtacctggcgaactgtgtatcgctggtgatgggttgtctaaaggttatcttaaccgtgaagagctcaccgcggaaaaatttatcccgcatccattcattcccggtgaacgtctgtacaagacgggcgaccttgccaaatggctcccagatggaaatatcgaatttataggccgcattgatcatcaggttaaaatccgtggctttcgaattgaactgggggagatcgaaagccgtttagaaatgcacgaggacatcaacgaaaccattgtgacggttcgcgaggatgaagagagccggccgtatatctgtgcatacattaccgctaatcgtgaaatttctcttgatgagctcaagggttttctgggggaaaaattacccgagtatatgatcccggcgtacttcgttaagctggataaactgccgttaacgaagaatggtaaagtcgaccggaaagccctgcctgaacccgatcgtactgcgggcgccgagaacgaatatgaggcaccgcgcaatgaaacagaagagaaactggcagctgtctggcaggacgtgttacatgttgaaaaagcaggcattcatgatcactttgctcaaatgggcggtcattcattgcacgcaatggaacttatcgctaagatcaaggaaaagatgaacgttgagatcccgctgcaccagttatttaagttggcgaccattaaagaactgtcggcgttcatcgaggccaatgtgccggttgagcagccatttgtgcatagccctgaagatcgctatcaaccgttcgcgctgaccgacgtacagcaagcctacctggtggggcgtcagccgggatttgccctgggcggtgttggctctcatttcttcgtcgaattcgagattgcagatttagacttgacccgcctggaaacggtttggaaccgtttaatagcacgccacgatatgttgcgtgctattgtacgtgacggtcagcaacaggtgctggaacagaccccgccatgggtgatcccggcgcatactctgcacacaccagaagaggcattacgagttagagaaaaactggctcatcaggtcttaaaccctgaagtctggcccgtatttgatctgcaagtgggctatgttgacggtatgccggcacgtctttggctctgcctagataatctattattggacgggctgagtatgcagattcttctcgccgaactggagcacggatatcgttaccctcaacagctactgcctcccctgccagttacctttcgtgattacttgcaacagccgagccttcagtctccgaacccagacagcctggcatggtggcaggctcaactggatgacatcccgccagcaccggctctcccactgcgttgtctgccacaggaagtggagactcctcgattcgcacggcttaatggcgctctcgattcaacacgttggcatcgtctgaaaaagcgcgcggccgacgcgcacctgactccgtcggccgtgttattgagtgtttggtccacagtcctgtcagcatggtcggctcagccggaatttactttaaacttgacacttttcgatcgtcgccctctgcatccccagattaatcaaatcttgggcgattttacctcacttatgcttctctcgtggcatccgggtgaatcctggctgcacagcgcgcagtctctgcaacagcgcttaagtcaaaacttgaatcaccgtgatgtttccgccattcgcgtcatgcggcagctggcgcaacagcaaaatgtcccggccgtacctatgcccgtggttttcacctctgcgctgggctttgaacaggataacttcctggcccggcgaaatctactgaaaccggtatggggtattagccagacgccgcaagtctggctggatcatcagatctatgaatctgagggcgaactgcgttttaactgggatttcgttgcagctctgtttccggcgggtcaggtggagcgtcagttcgaacaatactgcgcattattgaatcgcatggctgaggatgaaagcgggtggcagctcccgctggcggccctggtgcctcccgttaaacatgcgggtcagtgcgccgagcgcagcccgcgtgtttgtccagaacagtctcaaccgcacatcgcagctgatgaaagtactgtttccctgatatgtgacgcatttcgtgaggtcgtaggggaaagtgtgaccccggctgagaactttttcgaagcgggagccacgtccttaaatttggtacagctgcatgtgcttctccaacgtcacgaattttcaaccctgacgctactggatttattcacgcacccgtcgccagcggcccttgcggactatctcgcgggtgtcgccaccgtagaaaaaacgaagaggcctcggcccgtgagaaggcgtcagcgccggatccagcacttgcccttagtagctgcgcaacctggaatatggatggccgagaagttatctgaactaccatcagcgtggagcgtagcgcattacgtggagctcactggtgaggttgactcgcctcttttggccagggcggtagtggctggccttgcacaagctgacaccttaagaatgcgtttcacagaggataatggggaagtttggcaatgggtagacgatgcgttaacatttgagttaccggaaatcatagacctgcgcactaacatagaccctcacgggacagctcaggccttgatgcaagcggacctgcaacaggacctacgtgtggattcggggaagcctctggtcttccatcagctaattcaagtagcggacaatcgctggtactggtatcaaaggtaccaccacttgcttgtggacgggttcagttttccagcgataaccaggcaaatagccaacatttattgcacttggttgcgaggagagcctacgcccgcatcccccttcacgccattcgcagacgttgttgaggaataccaacagtatcgcgagagcgaagcgtggcaacgcgatgcggcattctgggcggagcaacgacggcaactaccgcctcccgcatccctatcacctgccccgctccccggccggtccgcgtcagccgacattctacggctaaagctggagttcacagatggtgaatttcgacagcttgctacacaactcagcggggtacaaaggacagacctagcgctcgctctggctgcattatggctaggacgactttgcaatcgaatggactacgcggcgggtttcatatttatgcgccggctcggcagcgcagcgttgaccgcaacgggtccagttttaaatgttcttcctttgggaatccacataggcaacccaagcttctctgagcttctcaccagggttcgcgaggtcgccttaggcgcgtatgcacaccaacatattccttttgagatgttagtagaggcactgcaaccagagcgaaaccttagccatactcctctcttccaagtgatgtttgtccttcagaatgcgcccgcgtcccaattagagttaaccgggatcaccgcaaacccaattaaggttaaatcaactaccacgaagttcgacctaactttaatcatgcaaaacacagctagcggattagtaggtgtttgggagtacaacacggatttattcgacgcgtcaacgattgagcgaatgacagggcactttgtaaccctcctcgagggcgttatcgccaatccacaacagccgatctctcaacttcctattttaactacagtggagcaacagcaacttttagtcgagtggaataacacgcaaaccgactaccccgctgataagtgtatacatcaattattcgaggaacaggtcgagcgcacaccagacgccgttgctgtcgtctttgggaatcagcaactcagctatcgagagatgcgcgaacaagtggttgcactcgccaatttattacgtgagcggggagtcaagccaggagactccgttgccgtggccttaccacgctctgttttcttaacccttgcactacacgcgattgtcgaggcaggtgccgcctggctacctcttgacacaggatatcctgacgatagattaaaaatgatgctcgaggatgcacggccttcccttctgatcacaacagacgatcaattaccccgcttcagtgacgtacctaatctgacctcactctgttacaacgctcccttgacgcctcaagggagcgcccctttacagctgtctcaacctcaccatactgcatatatcatctttacaagtggttctacgggacgccccaagggagtaatggttggtcagactgcgattgtaaatcgtctgttgtggatgcaaaaccactaccctttgacgggggaggacgttgtagcccaaaagactccttgctcgttcgatgtctcagtctgggagttcttttggccatttatagcaggggccaaattagttatggcggagccggaagcccaccgagacccacttgcgatgcagcaattctttgctgagtatggtgtcaccactacacatttcgtcccatcgatgttagcggccttcgtggcttctcttactccacaaacggctaggcaatcttgtgccacactaaagcaagtcttctgctccggcgaggcattacctgcagacttgtgccgggaatggcagcaactcacaggagctccattgcacaatctatacggaccgaccgaggccgcagtagacgtatcttggtatcctgcgtttggcgaggagttagcgcaagtaagaggttcgtcagtaccaataggataccccgtatggaacacggggcttcggatactggacgcgatgatgcatccggtcccaccaggagtcgcgggcgatttatacctgactgggatacagctggcccaaggttacctagggagacctgaccttacggcgtcgaggttcatagcggatccgtttgctccgggtgagcgcatgtaccgtacgggcgacgtcgcgcgatggctagataatggcgccgtagagtatcttggtagatcagacgatcagttaaagatacggggacaacgaatagagcttggggaaatagaccgggtaatgcaggctttgccagatgtcgagcaagcggtggcttcgtgtgctattgcgcgggaggacatacctgggaacaaacaccttgtagcgtacatagttcctcaagaggagcaaacatgcactgagcgatcgaggtccacacttacagtttcgttcgtccggagtttccttaaggagaaactccccgaatatatggtaccgagcgcaatagtgattctagacgctctccccctgactcctaatggaaagctagaccggcgggcgttacccgcccctgacctgcactcacaacttgagacaattattgctgcggctttctcgagcctgctcgggtgcgacgtacaagacgcggatgctgactttttcgcgctaggtggccattcgctgcttgccatgaagctagccgctcagctttcccgacaagtagcgcggcaggtgacaccaggccaagttatggtagcttcgactgtcgcaaagctcgcaacgatcatagacgcggagttagataaatacgtcgctccaaggaacccgatacctggaattggggcgctagttcccgctcccgtggtaatcgcagcaggccgtacggaggaaccaattgccatcgtttcgatggcatgtcgtttaccgggaggagtcaatacgccccaacggctctgggaattactacgggagggtggtgaaaccttgtccgggttcccaacggaccgtggctgggacctagcacggcttcaccaccctgatccggacaaccccggaacgagctacgttgataagggtggatttctcgacgacgcggcgggtttcgacgcagagtttttcggggtttcaccaagggaagctgccgctatggaccctcagcaacgattacttttagagacctcgtgggagctagttgaaaatgcgggcatagatccacatagcctgcgagggacagcgacaggggtgttcctaggagttgcgaagtttggttatggtgaggacacagcagcagcggaagatgttgaaggttattcagttaccggtgttgctcccgctgtggcatctggccgcatatcctacactatgggtttagaaggtccttccatctcggtcgataccgcatgctcaagctcgctagtcgcgcttcatctagccgtagagtccctccgaaagggtgagtcatctatggcggtggtgggtggtgcagccgttatggcgactcctggggtatttgttgatttttcacgccaacgggcgcttgccgcagacggccgttccaaagcgttcggggcaggtgcagatggttttggtttcagcgagggagtcacgctggttctactagagcgtttaagtgaggcgcgtcgtaacggtcatgaagttctagctgtagtgcgcgggtccgcgttaaaccaggacggagcgagcaacggactttcagcaccctccggccctgcgcaacgtagagtaataaggcaagcgctcgaatcgtgtgggcttgaaccgggggatgttgacgcggttgaggcgcatggtactggtacagcactaggtgacccaatagaggccaatgcgctgttggacacttacgggcgagaccgtgatgcggatcgtccactttggttggggtccgttaagagcaatattgggcacactcaagctgcggccggggttacaggactgctgaaggttgtgttagcactgcgcaatggtgagctacctgcaacgttacatgtcgaggaaccaactccacacgtcgattggtcctcaggtggtgtcgcattactggcgggtaatcaaccatggcgaaggggagaaaggaccagaagggcggcagtgagcgcctttggtatctccggtacaaatgctcacgtgatagtggaagaggcgcctcaggaagttcgacccgcccctggccaagggctgtcgccagccgtgtccacgttagttgttgcaggtaaaaccatgcagcgtgtaagtgcgacagctggaatgcttgcagactggatggagggtcctggggccgatgttgcattggcggatgtggcccataccctgaaccatcaccgatcaagacagcccaagttcgggacggttgtagcgcgtgacaggactcaggcgatagctgggctccgtgcattggcggctggtcaacatgctcctggggtcgtcaacccagctgaaggttccccaggaccaggcaccgtgttcgtttttcccggtcaaggttcgcagagggcagggatgggggaggaactcgcggcagcctttcctgtcttcgctcgaatacatcagcaagtttgggacctcctagatgttcccgacctcgacgttaatgaaaccgggtacgcccaaccagcgctgttcgcgcttcaggtcgcgctctttggccttctggagtcgtggggtgttaggccagatgcagtggtagggcactcagttggtgagctggccgcggggtacgtgtccggtctttggtcactagaggacgcctgcacactagtctcagcaagagcgcgcctaatgcaggcactgcctgctggaggggtgatggcggcagtccccgtctccgaggatgaggcgcgggccgtcctgggcgagggagttgaaattgcggctgtgaatggaccctcgtccgttgtgctctcaggggacgaggcggcagtcttacaggccgccgaaggtctaggtaagtggacgcgactgccgaccagccatgcttttcactcagcgagaatggaacccatgctagaagagtttcgggccgtagcagagggtctgacctatcgtacccctcaagtagctatggctgctggggatcaggtgatgacagcagaatattgggtgcggcaggttcgggacacagttcgcttcggggagcaagtagcgtcattcgaggatgcggtgtttgttgagttaggcgctgacagaagtctagcgcgtttggtggacggcatcgccatgctgcacggtgaccacgaagcgcaggccgcggaccataggcaaatcaccgaagcggttgcggatgcttacgtcttaggccaccttccggattttgcggcgctgcggcggcctcacgcacgaaagttggacttaccaacttatcccttcgagcgtagacagtactggttcagagatgcgcgtgagaggccggaacaacccagagataccggcggacctcgcacagaagcagtccgtctgttagaggatggtaggattgaagaattagctgcacttttgggaggggccagtgatgaccaacacacattacaggtgctgactaagttggcggcgcaacataaccaacaacgaacaacccggtcaatcgctgacgacaggtacgaaataaggtgggaccgatcgacttccccactatccggagcagatgttgaccaagcggggagctggatcgtggtgtcagatgacgcagatgccgttcccccgctagtggacttgctggctgcacgtaacgagccccatcaggttgttggtctacccgcttcggacgcagacgaggagaggctcgcagagactctgcgtgcggctgcgactgaagatgctacccttcggatagtccacgttgcggcgctcgaagcaggcgctacccccagcatgcgttcactgctccgcatgcagcaccgaatactaggtggcacgcggcgggtgttcagggcagcggtcgcagcggagttaagaggtcccatttggatagtgacgcggggagcacaaagagtggctgacaccgatacagttgccccgcatcagtcatgcctctggggatttgggagggcagcatcgctggagctgccgcacgtttggggtggcctagcagatttatcagagggcggtgacaatgcggccgatgagtggagtgcgctagtggaccgcattgccgcaccccacggttcagcagttagggaggaccaactggcgctgagagacagggccgtatatacgccaagactggccagacgttctgcgcccccgagcgggactcccctacatctacgaggggatggcacagtgttaataacaggtgggactggtacactaggtaggctattagcgcgtcacctagtaacagagcatggggtgcggcatctcttactagtttcaaggagaggcgccgatgcccctggctcggatgaactgcgcgcagaaatagaggacttaggtgccagcgcggagatcgcagcgtgtgatacagcggatcgcgatgccctatctgccctactagatggtctcccccggccccttacgggtgtcgttcacgccgctggcgtgttagccgatggacttgtcactagcattgacgagcctgcggtggaacaggttctccgagcaaaggtggacgcggcatggaacctacacgaactcacagctaataccgggctatcctttttcgttcttttctcatcagcagcatcggtcctggcaggtccagggcaaggagtttatgcggctgcaaatgaatcgctcaacgcactagctgcgttaaggcgaactaggggtctgccggccaaggctctgggatggggcctgtgggccatcgggcgggcaatcgcttttgcggagcagaccggggacgccatcgctccagaggaaggagcatacgcttttgaaactctgttaaggcataaccgtgcctactcgggatatgcgcccgtcattggatctccctggttgaccgcgttcgcacagcattccccctttgcagaaaaattccaatcactcggacagaatcggtcagggacatcgaaattcttagcggagctagttgacctgcctcgtgaggaatggccggataggctcaggagactactagagttagttaggtcccatgccgccgcggtctccggttacggtagtgcagatcaactgccggaaagaaaagcgttcaaggatttggggtttgattcgctggccgccgttgaactgcgtaaccggctgggaacggctacaggggtacgactgccgtcaaccctagtatttgatcacccaactccgctggccgtcgctgagcacttaagagataggctaacatccggggaagataaccctatccccctatgtcaaggcgatggggaggagatgagcacatggctacgtcgttttggacccccagtcgaacatcgggccaggctagtgtgtttcccccacgcaggcgcagcggcggattcatacttagacctagcaagagcgttagcaccagagatcgatgttcatgctgttcaataccccggcaggcaagacagaagggacgaggagccattaggaaccgcaggtgaaattgcagatgaagtggcagcggtgctacgtgcgtcgggaggggatgggccttttgcacttttcggccacagtatgggcgccctcatcgcgtacgagacagcaaggcgattagagagggaaccgggagggggacccttacgtttattcgtgagcggacaaacagcgccacgtgtccatgaacgaagaactgatctgcccggtgacgatggactcgtggacgagcttaggcgacttggcacctccgaggcagcgctcgcagacgaagccctgctggctatgtctctcccggtgctcagggcggattatagggtgttaagatcctacgcttgggcggatggtcccccactacgcgccggtataactgccctctgcggtgatgcagacccactaactgcaacaggggatgcggaacgctggttacaacattccgtgattccgggtcggacacggacatttcccggtgggcatttttatttaggggaacaagtgaccgaggtggcaggggctgtccgtagagatttactgagagcagggttagcgggttga

SEQ ID NO: 16 - DNA, 12291 bp, Artificial Sequence
  ISS
atggttgccaaacatagtctggaaaacggtgtctttcacaagatgactgaaaacgagaaggaattgatccttcatttcaacaacactaagacagattaccctaagaacaagacgttgcatgaactttttgaagagcaggcaatgaaaaccccggatcacacagcactggtgttcggcgctcagagaatgacctacagggaactgaacgagaaggcgaatcaaacggcccgtctgttacgcgaaaaagggatcggacgtggcagcattgcggccattatcgcagatcgctcttttgaaatgatcatcggaatcatcggcatcctaaaggcaggcggtgcttatctgccgattgacccagaaaccccgaaagatcgtatcgcgttcatgctgagcgataccaaggcagctgtattgcttacgcagggaaaagcggccgatggcattgactgcgaagcggatatcgtgcaactggaccgtgaagccagcgatggtttttctaaagagccgctgagctctgttaatgatagtggcgacaccgcgtatattatctacacgagtggttccaccgggaccccgaaaggtgtgattaccccgcattattccgttatccgcgtggttcagaacactaactacatcgatatcacagaagacaacgtaatcctccaactatcaaactactcgttcgacggtagtgtgtttgatattttcggtgcgctcctaaacggggcctccctggtgatgatcgagaaagaagcactgttaaacattaatcgtctgggctcagctatcaatgaagagaaagtgagcgtgatgtttattaccacggcgctgttcaacatgattgccgatatccatgttgactgcctctcaaacctgcgtaaaattctgtttggcggcgaacgagcttcgatcccacatgtccgcaaggtactgaaccacgtcggtcgcgataaattaattcacgtatatggcccgactgaatcaacagtgtacgccacctattacttcataaacgaaattgatgacgaggcggaaactatccccataggtagcccgctggccaataccagcgtgctgattatggacgaagcaggcaaactggtcccaattggagtacctggcgaactgtgtatcgctggtgatgggttgtctaaaggttatcttaaccgtgaagagctcaccgcggaaaaatttatcccgcatccattcattcccggtgaacgtctgtacaagacgggcgaccttgccaaatggctcccagatggaaatatcgaatttataggccgcattgatcatcaggttaaaatccgtggctttcgaattgaactgggggagatcgaaagccgtttagaaatgcacgaggacatcaacgaaaccattgtgacggttcgcgaggatgaagagagccggccgtatatctgtgcatacattaccgctaatcgtgaaatttctcttgatgagctcaagggttttctgggggaaaaattacccgagtatatgatcccggcgtacttcgttaagctggataaactgccgttaacgaagaatggtaaagtcgaccggaaagccctgcctgaacccgatcgtactgcgggcgccgagaacgaatatgaggcaccgcgcaatgaaacagaagagaaactggcagctgtctggcaggacgtgttacatgttgaaaaagcaggcattcatgatcactttgctcaaatgggcggtcattcattgcacgcaatggaacttatcgctaagatcaaggaaaagatgaacgttgagatcccgctgcaccagttatttaagttggcgaccattaaagaactgtcggcgttcatcgaggccaatgtgccggttgagcagccatttgtgcatagccctgaagatcgctatcaaccgttcgcgctgaccgacgtacagcaagcctacctggtggggcgtcagccgggatttgccctgggcggtgttggctctcatttcttcgtcgaattcgagattgcagatttagacttgacccgcctggaaacggtttggaaccgtttaatagcacgccacgatatgttgcgtgctattgtacgtgacggtcagcaacaggtgctggaacagaccccgccatgggtgatcccggcgcatactctgcacacaccagaagaggcattacgagttagagaaaaactggctcatcaggtcttaaaccctgaagtctggcccgtatttgatctgcaagtgggctatgttgacggtatgccggcacgtctttggctctgcctagataatctattattggacgggctgagtatgcagattcttctcgccgaactggagcacggatatcgttaccctcaacagctactgcctcccctgccagttacctttcgtgattacttgcaacagccgagccttcagtctccgaacccagacagcctggcatggtggcaggctcaactggatgacatcccgccagcaccggctctcccactgcgttgtctgccacaggaagtggagactcctcgattcgcacggcttaatggcgctctcgattcaacacgttggcatcgtctgaaaaagcgcgcggccgacgcgcacctgactccgtcggccgtgttattgagtgtttggtccacagtcctgtcagcatggtcggctcagccggaatttactttaaacttgacacttttcgatcgtcgccctctgcatccccagattaatcaaatcttgggcgattttacctcacttatgcttctctcgtggcatccgggtgaatcctggctgcacagcgcgcagtctctgcaacagcgcttaagtcaaaacttgaatcaccgtgatgtttccgccattcgcgtcatgcggcagctggcgcaacagcaaaatgtcccggccgtacctatgcccgtggttttcacctctgcgctgggctttgaacaggataacttcctggcccggcgaaatctactgaaaccggtatggggtattagccagacgccgcaagtctggctggatcatcagatctatgaatctgagggcgaactgcgttttaactgggatttcgttgcagctctgtttccggcgggtcaggtggagcgtcagttcgaacaatactgcgcattattgaatcgcatggctgaggatgaaagcgggtggcagctcccgctggcggccctggtgcctcccgttaaacatgcgggtcagtgcgccgagcgcagcccgcgtgtttgtccagaacagtctcaaccgcacatcgcagctgatgaaagtactgtttccctgatatgtgacgcatttcgtgaggtcgtaggggaaagtgtgaccccggctgagaactttttcgaagcgggagccacgtccttaaatttggtacagctgcatgtgcttctccaacgtcacgaattttcaaccctgacgctactggatttattcacgcacccgtcgccagcggcccttgcggactatctcgcgggtgtcgccaccgtagaaaaaacgaagaggcctcggcccgtgagaaggcgtcagcgccggatccagcacttgcccttagtagctgcgcaacctggaatatggatggccgagaagttatctgaactaccatcagcgtggagcgtagcgcattacgtggagctcactggtgaggttgactcgcctcttttggccagggcggtagtggctggccttgcacaagctgacaccttaagaatgcgtttcacagaggataatggggaagtttggcaatgggtagacgatgcgttaacatttgagttaccggaaatcatagacctgcgcactaacatagaccctcacgggacagctcaggccttgatgcaagcggacctgcaacaggacctacgtgtggattcggggaagcctctggtcttccatcagctaattcaagtagcggacaatcgctggtactggtatcaaaggtaccaccacttgcttgtggacgggttcagttttccagcgataaccaggcaaatagccaacatttattgcacttggttgcgaggagagcctacgcccgcatcccccttcacgccattcgcagacgttgttgaggaataccaacagtatcgcgagagcgaagcgtggcaacgcgatgcggcattctgggcggagcaacgacggcaactaccgcctcccgcatccctatcacctgccccgctccccggccggtccgcgtcagccgacattctacggctaaagctggagttcacagatggtgaatttcgacagcttgctacacaactcagcggggtacaaaggacagacctagcgctcgctctggctgcattatggctaggacgactttgcaatcgaatggactacgcggcgggtttcatatttatgcgccggctcggcagcgcagcgttgaccgcaacgggtccagttttaaatgttcttcctttgggaatccacataggcaacccaagcttctctgagcttctcaccagggttcgcgaggtcgccttaggcgcgtatgcacaccaacatattccttttgagatgttagtagaggcactgcaaccagagcgaaaccttagccatactcctctcttccaagtgatgtttgtccttcagaatgcgcccgcgtcccaattagagttaaccgggatcaccgcaaacccaattaaggttaaatcaactaccacgaagttcgacctaactttaatcatgcaaaacacagctagcggattagtaggtgtttgggagtacaacacggatttattcgacgcgtcaacgattgagcgaatgacagggcactttgtaaccctcctcgagggcgttatcgccaatccacaacagccgatctctcaacttcctattttaactacagtggagcaacagcaacttttagtcgagtggaataacacgcaaaccgactaccccgctgataagtgtatacatcaattattcgaggaacaggtcgagcgcacaccagacgccgttgctgtcgtctttgggaatcagcaactcagctatcgagagatgcgcgaacaagtggttgcactcgccaatttattacgtgagcggggagtcaagccaggagactccgttgccgtggccttaccacgctctgttttcttaacccttgcactacacgcgattgtcgaggcaggtgccgcctggctacctcttgacacaggatatcctgacgatagattaaaaatgatgctcgaggatgcacggccttcccttctgatcacaacagacgatcaattaccccgcttcagtgacgtacctaatctgacctcactctgttacaacgctcccttgacgcctcaagggagcgcccctttacagctgtctcaacctcaccatactgcatatatcatctttacaagtggttctacgggacgccccaagggagtaatggttggtcagactgcgattgtaaatcgtctgttgtggatgcaaaaccactaccctttgacgggggaggacgttgtagcccaaaagactccttgctcgttcgatgtctcagtctgggagttcttttggccatttatagcaggggccaaattagttatggcggagccggaagcccaccgagacccacttgcgatgcagcaattctttgctgagtatggtgtcaccactacacatttcgtcccatcgatgttagcggccttcgtggcttctcttactccacaaacggctaggcaatcttgtgccacactaaagcaagtcttctgctccggcgaggcattacctgcagacttgtgccgggaatggcagcaactcacaggagctccattgcacaatctatacggaccgaccgaggccgcagtagacgtatcttggtatcctgcgtttggcgaggagttagcgcaagtaagaggttcgtcagtaccaataggataccccgtatggaacacggggcttcggatactggacgcgatgatgcatccggtcccaccaggagtcgcgggcgatttatacctgactgggatacagctggcccaaggttacctagggagacctgaccttacggcgtcgaggttcatagcggatccgtttgctccgggtgagcgcatgtaccgtacgggcgacgtcgcgcgatggctagataatggcgccgtagagtatcttggtagatcagacgatcagttaaagatacggggacaacgaatagagcttggggaaatagaccgggtaatgcaggctttgccagatgtcgagcaagcggtggcttcgtgtgctattgcgcgggaggacatacctgggaacaaacaccttgtagcgtacatagttcctcaagaggagcaaacatgcactgagcgatcgaggtccacacttacagtttcgttcgtccggagtttccttaaggagaaactccccgaatatatggtaccgagcgcaatagtgattctagacgctctccccctgactcctaatggaaagctagaccggcgggcgttacccgcccctgacctgcactcacaacttgagacaattattgctgcggctttctcgagcctgctcgggtgcgacgtacaagacgcggatgctgactttttcgcgctaggtggccattcgctgcttgccatgaagctagccgctcagctttcccgacaagtagcgcggcaggtgacaccaggccaagttatggtagcttcgactgtcgcaaagctcgcaacgatcatagacgcggagttagataaatacgtcgctccaaggaacccgatactgccagtagaacagccttttgtgcactcaccggaagagcggtatcgaccattcgcgttaacggatgttcagcaagcctacctggtcgggcgccagccgggatttgccctgggcggtgtaggctcgcatttcttcgtggaattcgagatcgcagatctcgacatacaccgcctggaaaaagtgtggaaccgtttaattgcacgtcatgatatgttgcgcgctgtggttcgtgacggtcagcaacgtgtactggaacagaccccgccatgggtcataccagcacatattcttcacagtcctgaagaggcattacaggttcgtgatcgtttagctcaccaagtgttgaaccccgaagtctggccggtatttgatctgcaggtgggcttcgttgacggtatgccggcccgtttatggttgtgccttgataacctgttattggacgggctgagcatgcagattcttctctctgaactggagcatggatatcgctacccacagcaactccctcccccgttgccgatcacttttcgcgattatcttcagcaaccggcactccgtaccccaaatcctgactcattggcttggtggcagacgcaactggatgacatcccacctgcgcccgccctcccgctacgttgtctgcctcaagatgttgaaaccccgcgtttcgcgcgtctgtacggcgcaatggattctgctcgttggcgtcgcctgaaacagcgtgcggccgacgcacatctgactccgtcagctgtcctactgagcgtatggtctacagtgctggcagcttggtcggcgcagccggattttactctcaacctgacattattcgaccggcgaccactgcaccctcagattaatcaaatccttggcgattttacctcactgatgttattgtcgtggcatccgggtgagagttggctgcagtccgcgcgtcttctccagcaacgcctttcagaatcgctcaaccaccgtgatgttagcgccattcgcgtcatgcggcagctggcgagaaggcaaaatgtcccggccgtacccatgccggtcgtatttacctctgcgctggggtttgaacaggataacttcctggcccgtcgcaatctactgaaaccggtgtggggtatcagtcagacgccgcaagtttggctggaccatcaggtctatgaatccgagggcgaactgcgttttaactgggatttcgttgcggccctgtttccggacggtcaagtggaacgtcagttcgcgcaatactgcgccttattgaatcgcatggcagaagatgacagctcttggcagttgccgcttgctgatctggtgcccccgttaaaagtgaccgagcggcgagcgagaaggctgcgtccagaacgcgcccagcctcgtattgcagctgataagagttccgttagtctgatctgtgacacttttcgtgaggtggttggggaacccgtggcaccggctgagaactttttcgaagcgggagccacatccctcaatctggttcagctgcatgtccttctccaacgtcacgaatttgcgaccttaacgctactggatttgttcacccatccaagccctgttgcattggctaactatcttgcgggtgtggccctggaagagaaaacgaagcgcgtgcggccggttcggcgaagacagcgtcgcattcagcacttgcccttagtagctgcgcaacctggaatatggatggccgagaagttatctgaactaccatcagcgtggagcgtagcgcattacgtggagctcactggtgaggttgactcgcctcttttggccagggcggtagtggctggccttgcacaagctgacaccttaagaatgcgtttcacagaggataatggggaagtttggcaatgggtagacgatgcgttaacatttgagttaccggaaatcatagacctgcgcactaacatagaccctcacgggacagctcaggccttgatgcaagcggacctgcaacaggacctacgtgtggattcggggaagcctctggtcttccatcagctaattcaagtagcggacaatcgctggtactggtatcaaaggtaccaccacttgcttgtggacgggttcagttttccagcgataaccaggcaaatagccaacatttattgcacttggttgcgaggagagcctacgcccgcatcccccttcacgccattcgcagacgttgttgaggaataccaacagtatcgcgagagcgaagcgtggcaacgcgatgcggcattctgggcggagcaacgacggcaactaccgcctcccgcatccctatcacctgccccgctccccggccggtccgcgtcagccgacattctacggctaaagctggagttcacagatggtgaatttcgacagcttgctacacaactcagcggggtacaaaggacagacctagcgctcgctctggctgcattatggctaggacgactttgcaatcgaatggactacgcggcgggtttcatatttatgcgccggctcggcagcgcagcgttgaccgcaacgggtccagttttaaatgttcttcctttgggaatccacataggcaacccaagcttctctgagcttctcaccagggttcgcgaggtcgccttaggcgcgtatgcacaccaacatattccttttgagatgttagtagaggcactgcaaccagagcgaaaccttagccatactcctctcttccaagtgatgtttgtccttcagaatgcgcccgcgtcccaattagagttaaccgggatcaccgcaaacccaattaaggttaaatcaactaccacgaagttcgacctaactttaatcatgcaaaacacagctagcggattagtaggtgtttgggagtacaacacggatttattcgacgcgtcaacgattgagcgaatgacagggcactttgtaaccctcctcgagggcgttatcgccaatccacaacagccgatctctcaacttcctattttaactacagtggagcaacagcaacttttagtcgagtggaataacacgcaaaccgactaccccgctgataagtgtatacatcaattattcgaggaacaggtcgagcgcacaccagacgccgttgctgtcgtctttgggaatcagcaactcagctatcgagagatgcgcgaacaagtggttgcactcgccaatttattacgtgagcggggagtcaagccaggagactccgttgccgtggccttaccacgctctgttttcttaacccttgcactacacgcgattgtcgaggcaggtgccgcctggctacctcttgacacaggatatcctgacgatagattaaaaatgatgctcgaggatgcacggccttcccttctgatcacaacagacgatcaattaccccgcttcagtgacgtacctaatctgacctcactctgttacaacgctcccttgacgcctcaagggagcgcccctttacagctgtctcaacctcaccatactgcatatatcatctttacaagtggttctacgggacgccccaagggagtaatggttggtcagactgcgattgtaaatcgtctgttgtggatgcaaaaccactaccctttgacgggggaggacgttgtagcccaaaagactccttgctcgttcgatgtctcagtctgggagttcttttggccatttatagcaggggccaaattagttatggcggagccggaagcccaccgagacccacttgcgatgcagcaattctttgctgagtatggtgtcaccactacacatttcgtcccatcgatgttagcggccttcgtggcttctcttactccacaaacggctaggcaatcttgtgccacactaaagcaagtcttctgctccggcgaggcattacctgcagacttgtgccgggaatggcagcaactcacaggagctccattgcacaatctatacggaccgaccgaggccgcagtagacgtatcttggtatcctgcgtttggcgaggagttagcgcaagtaagaggttcgtcagtaccaataggataccccgtatggaacacggggcttcggatactggacgcgatgatgcatccggtcccaccaggagtcgcgggcgatttatacctgactgggatacagctggcccaaggttacctagggagacctgaccttacggcgtcgaggttcatagcggatccgtttgctccgggtgagcgcatgtaccgtacgggcgacgtcgcgcgatggctagataatggcgccgtagagtatcttggtagatcagacgatcagttaaagatacggggacaacgaatagagcttggggaaatagaccgggtaatgcaggctttgccagatgtcgagcaagcggtggcttcgtgtgctattgcgcgggaggacatacctgggaacaaacaccttgtagcgtacatagttcctcaagaggagcaaacatgcactgagcgatcgaggtccacacttacagtttcgttcgtccggagtttccttaaggagaaactccccgaatatatggtaccgagcgcaatagtgattctagacgctctccccctgactcctaatggaaagctagaccggcgggcgttacccgcccctgacctgcactcacaacttgagacaattattgctgcggctttctcgagcctgctcgggtgcgacgtacaagacgcggatgctgactttttcgcgctaggtggccattcgctgcttgccatgaagctagccgctcagctttcccgacaagtagcgcggcaggtgacaccaggccaagttatggtagcttcgactgtcgcaaagctcgcaacgatcatagacgcggagttagataaatacgtcgctccaaggaacccgataacatccggggaagataaccctatccccctatgtcaaggcgatggggaggagatgagcacatggctacgtcgttttggacccccagtcgaacatcgggccaggctagtgtgtttcccccacgcaggcgcagcggcggattcatacttagacctagcaagagcgttagcaccagagatcgatgttcatgctgttcaataccccggcaggcaagacagaagggacgaggagccattaggaaccgcaggtgaaattgcagatgaagtggcagcggtgctacgtgcgtcgggaggggatgggccttttgcacttttcggccacagtatgggcgccctcatcgcgtacgagacagcaaggcgattagagagggaaccgggagggggacccttacgtttattcgtgagcggacaaacagcgccacgtgtccatgaacgaagaactgatctgcccggtgacgatggactcgtggacgagcttaggcgacttggcacctccgaggcagcgctcgcagacgaagccctgctggctatgtctctcccggtgctcagggcggattatagggtgttaagatcctacgcttgggcggatggtcccccactacgcgccggtataactgccctctgcggtgatgcagacccactaactgcaacaggggatgcggaacgctggttacaacattccgtgattccgggtcggacacggacatttcccggtgggcatttttatttaggggaacaagtgaccgaggtggcaggggctgtccgtagagatttactgagagcagggttagcgggttga

SEQ ID NO: 17 - DNA, 11961 bp, Artificial Sequence
  MCC
atgaacccaccctgcgggccagtccgtgcgaattgcgtacacatatccatagatttccccatgccagtttccaaagtttccggtcctcgatcaaggacaaccagccggaggacacccgtccggattggggccgtggtggtggcaagctcgactagcgaactccttgatgggctcgcagcggttgctgatggtaggccacacgccagcgtagttaggggcgttgcgcgcccttctgcgccggttgtattcgttttcccaggtcaaggagcgcaatgggctgggatggcgggggagctactcggggagagtcgggtctttgcagccgctatggacgcctgcgcgagggcgttcgaacctgtaaccgattggacattggcccaagttttggattcaccagagcaatcccggcgtgtagaggtcgtccaacccgccctttttgcagtgcagacctctttggctgcactctggagatctttcggcgtgacacccgacgcagtcgtagggcactctatcggggagcttgcggcggcgcacgtctgtggggcagccggggcagctgacgcggcaagagctgccgcactgtggtcacgagaaatgatcccactagtggggaacggtgacatggcggcggttgcactctcggcagatgagattgaaccacggatcgcccgttgggacgacgacgtcgtgcttgctggtgttaatggtccccgctcggttttactaaccggcagccctgaaccagtagcaagaagggtacaagaactttcggcagagggagttcgggcacaggtcattaatgtgagcatggcggcccattccgcgcaggtggacgatattgcagaagggatgagatcggctctggcgtggtttgccccaggcgggtccgaagttccattttacgccagcctcactgggggagccgtggacacgcgagaactcgttgcggattactggcgacgctcattcagactgcccgttcgtttcgatgaagctataagatcagccctggaagttgggccaggtacattcgtcgaggcctcaccccacccagtcctggcggctgccctacagcagacactggacgcagaggggtcgtcggcagcggtggtccccacattacagcgggggcaaggcggaatgcgtcggttcctcttggcagcggcacaggcattcactggaggagtggccgtcgattggaccgcggcctatgatgatgtggggcctaacccggccctatgtcgatcgtctcggcgcccaagacggaaaacttcgcgaccgtcaccagcttcgacgggaacaagacatagaacttgctgcgaacggctgctcgccgtcgtgaacggcgaaactgccgcattagccggacgtgaagcagatgcagaggcaacctttcgagagcttgggttagattccgttctggcggcccagctcagagctaaagtatccgcggcgataggtcgagaagtcaatattgcactactctatgaccacccaaccccgagagcactcgcagaggcacttgctgtgccggttgagcagccatttgtgcatagccctgaagatcgctatcaaccgttcgcgctgaccgacgtacagcaagcctacctggtggggcgtcagccgggatttgccctgggcggtgttggctctcatttcttcgtcgaattcgagattgcagatttagacttgacccgcctggaaacggtttggaaccgtttaatagcacgccacgatatgttgcgtgctattgtacgtgacggtcagcaacaggtgctggaacagaccccgccatgggtgatcccggcgcatactctgcacacaccagaagaggcattacgagttagagaaaaactggctcatcaggtcttaaaccctgaagtctggcccgtatttgatctgcaagtgggctatgttgacggtatgccggcacgtctttggctctgcctagataatctattattggacgggctgagtatgcagattcttctcgccgaactggagcacggatatcgttaccctcaacagctactgcctcccctgccagttacctttcgtgattacttgcaacagccgagccttcagtctccgaacccagacagcctggcatggtggcaggctcaactggatgacatcccgccagcaccggctctcccactgcgttgtctgccacaggaagtggagactcctcgattcgcacggcttaatggcgctctcgattcaacacgttggcatcgtctgaaaaagcgcgcggccgacgcgcacctgactccgtcggccgtgttattgagtgtttggtccacagtcctgtcagcatggtcggctcagccggaatttactttaaacttgacacttttcgatcgtcgccctctgcatccccagattaatcaaatcttgggcgattttacctcacttatgcttctctcgtggcatccgggtgaatcctggctgcacagcgcgcagtctctgcaacagcgcttaagtcaaaacttgaatcaccgtgatgtttccgccattcgcgtcatgcggcagctggcgcaacagcaaaatgtcccggccgtacctatgcccgtggttttcacctctgcgctgggctttgaacaggataacttcctggcccggcgaaatctactgaaaccggtatggggtattagccagacgccgcaagtctggctggatcatcagatctatgaatctgagggcgaactgcgttttaactgggatttcgttgcagctctgtttccggcgggtcaggtggagcgtcagttcgaacaatactgcgcattattgaatcgcatggctgaggatgaaagcgggtggcagctcccgctggcggccctggtgcctcccgttaaacatgcgggtcagtgcgccgagcgcagcccgcgtgtttgtccagaacagtctcaaccgcacatcgcagctgatgaaagtactgtttccctgatatgtgacgcatttcgtgaggtcgtaggggaaagtgtgaccccggctgagaactttttcgaagcgggagccacgtccttaaatttggtacagctgcatgtgcttctccaacgtcacgaattttcaaccctgacgctactggatttattcacgcacccgtcgccagcggcccttgcggactatctcgcgggtgtcgccaccgtagaaaaaacgaagaggcctcggcccgtgagaaggcgtcagcgccggatcggagagccgttcccactcgctcctatgcaacacgccatgtgggtagggcggcacgaccaccaacagctcgggggagtagcaggccatctttacgtcgagtttgacggcgcgagagtcgaccccgatcggttgcgcgctgccgccacccgactcgccctacgtcaccctatgttgagggtacagttcctgcctgacggtacacaaaggatccctccagccgcaggctcgcgggactttcccatcagcgttgcggatcttcgtcacgtagctcctgacgttgtcgatcaacggctcgcgggtattagagacgcaaagtctcatcaacagcttgatggagctgtcttcgagttggctctcactctcctgccaggtgaaaggacgaggctgcacgtcgacctggatatgcaagctgctgacgccatgagctacaggatcctgctggcggacttggccgcactatacgacgggagagagcccccagcactcggttacacgtatagagagtaccgccaggctattgaggccgaggaaacattaccgcaacctgttcgcgacgccgatagggactggtgggcacaaagaataccacagcttccagacccgcccgcactaccgacgcgtgccggtggtgagagagatcgccggcgctcgaccagaagatggcactggttagacccacaaacaagggacgccctcttcgcacgagcacgagctcgtggcatcacacctgcaatgacacttgcggccgcgtttgcaaatgtcctcgcgagatggtccgcctcttcccggttcttactcaatttgccccttttctcgcgccaagcgttgcatccggacgtagacctcttggtaggtgacttcacatcgtcgctgctgttagatgttgacctaggagatacagtgtctaatcttgctcggaagaaccaactgacttttacggaggactgggaacaccggcattggagcggagtagagttgctgcgagaactcaaaaggcaacagcgttacccacacggagcgcccgtggtgttcacttctaatcttgggcgcagtttatattcttctcgggcggagtcccccttgggagagcctgaatggggaatttcgcaaacaccacaggtttggatcgaccatttagcatttgagcaccatggggaagtatggctccaatgggactcgaacgacgccctcttcccacctgctttagtcgagactctgtttgacgcgtactgtcaattgataaaccagctgtgcgacgatgaatccgcatggcaaaagcccttcgcggacatgatgccggcgagtcagcgtgctattcgtgagcgggtgaacgctaccggcgcaccgatcccggagggcctcttacacgaagggatttttcggatcgctcttcaacagcctcaggcgctcgcggtaacggacatgcggtaccaatggaatagttatcgagagatgcgggaacaggtcgtcgctttggcaaatctactccgagagcgcggggtcaagccaggggactcagtcgctgtagcgcttcctcggtcagtcttcctaaccttggctctccacgcgatcgtagaggcgggtgcggcgtggcttcccctcgacacgggctatccggacgatcggttgaagatgatgctagaggatgcacgaccctctctgttaatcacaaccgacgatcaactccccaggttctcagacgtccctaatcttaccagtctatgttacaacgcgcccctcactccacaaggcagcgctcctttacaacttagtcagccgcaccataccgcttatatcatttttacgtccggttccacgggcaggccgaagggtgtaatggtgggccaaactgcaatagtgaatagactattgtggatgcaaaaccactacccgcttaccggggaggacgtagtggctcaaaagactccctgctctttcgatgtcagcgtgtgggagttcttttggccttttatagccggcgctaaattggttatggcggagccggaagctcaccgagaccctttggccatgcaacagttctttgcagagtatggagtcacaacgacgcatttcgtcccatcgatgttagccgcgttcgtagcatcattgacgccacaaactgcgagacagtcatgtgccacacttaagcaagtcttctgctctggtgaggcccttcctgcggacctatgtcgggaatggcaacagcttactggagcccccttgcacaatctttacgggccgactgaggccgcagttgacgtatcgtggtatccagcgttcggggaggagctagcccaagtgcgagggtctagtgttccaattggatacccggtgtggaacacagggttaaggatcctcgacgccatgatgcatccggtaccaccaggtgtcgctggggatttgtacctgactggcattcaactggcacagggttatctagggcggcctgacttaacagctagccgattcatagcagatccattcgctcccggagagcggatgtaccgaacaggcgacgtggcacgctggttagataatggcgctgtcgagtatcttgggcggtcagacgatcagttaaagatacgtggacaacggattgagcttggtgaaatagaccgagttatgcaggcactaccagatgtcgagcaagccgtagcctcttgtgccattgcgcgagaagacattcccgggaacaagcacttggttgcgtacatagtgccgcaagaggagcagacctgcacagagcggtcacgttcaactctcacagtttccttcgtccgttctttcttaaaggagaaactaccagaatatatggtaccgtccgcgatcgtgatattagacgctctgccactcacgccaaatggaaagttggatagaagagctctgcctgctcctgacttgcactcgcaactcctggataaatacgttgctcccagaaacccaatagagactattatcgcggcagcattctcttcattgcttggatgcgacgtccaagatgcggacgcagatttctttgcgctcgggggccatagtctattggccatgaagctcgcagcgcaattgtcgagacaggtagcacggcaagtaacgcccgggcaagtcatggtcgcctcgacagtcgcgaaactcgcgaccattatcgacgctgagctgccagtagaacagccttttgtgcactcaccggaagagcggtatcgaccattcgcgttaacggatgttcagcaagcctacctggtcgggcgccagccgggatttgccctgggcggtgtaggctcgcatttcttcgtggaattcgagatcgcagatctcgacatacaccgcctggaaaaagtgtggaaccgtttaattgcacgtcatgatatgttgcgcgctgtggttcgtgacggtcagcaacgtgtactggaacagaccccgccatgggtcataccagcacatattcttcacagtcctgaagaggcattacaggttcgtgatcgtttagctcaccaagtgttgaaccccgaagtctggccggtatttgatctgcaggtgggcttcgttgacggtatgccggcccgtttatggttgtgccttgataacctgttattggacgggctgagcatgcagattcttctctctgaactggagcatggatatcgctacccacagcaactccctcccccgttgccgatcacttttcgcgattatcttcagcaaccggcactccgtaccccaaatcctgactcattggcttggtggcagacgcaactggatgacatcccacctgcgcccgccctcccgctacgttgtctgcctcaagatgttgaaaccccgcgtttcgcgcgtctgtacggcgcaatggattctgctcgttggcgtcgcctgaaacagcgtgcggccgacgcacatctgactccgtcagctgtcctactgagcgtatggtctacagtgctggcagcttggtcggcgcagccggattttactctcaacctgacattattcgaccggcgaccactgcaccctcagattaatcaaatccttggcgattttacctcactgatgttattgtcgtggcatccgggtgagagttggctgcagtccgcgcgtcttctccagcaacgcctttcagaatcgctcaaccaccgtgatgttagcgccattcgcgtcatgcggcagctggcgagaaggcaaaatgtcccggccgtacccatgccggtcgtatttacctctgcgctggggtttgaacaggataacttcctggcccgtcgcaatctactgaaaccggtgtggggtatcagtcagacgccgcaagtttggctggaccatcaggtctatgaatccgagggcgaactgcgttttaactgggatttcgttgcggccctgtttccggacggtcaagtggaacgtcagttcgcgcaatactgcgccttattgaatcgcatggcagaagatgacagctcttggcagttgccgcttgctgatctggtgcccccgttaaaagtgaccgagcggcgagcgagaaggctgcgtccagaacgcgcccagcctcgtattgcagctgataagagttccgttagtctgatctgtgacacttttcgtgaggtggttggggaacccgtggcaccggctgagaactttttcgaagcgggagccacatccctcaatctggttcagctgcatgtccttctccaacgtcacgaatttgcgaccttaacgctactggatttgttcacccatccaagccctgttgcattggctaactatcttgcgggtgtggccctggaagagaaaacgaagcgcgtgcggccggttcggcgaagacagcgtcgcattggagagccgttcccactcgctcctatgcaacacgccatgtgggtagggcggcacgaccaccaacagctcgggggagtagcaggccatctttacgtcgagtttgacggcgcgagagtcgaccccgatcggttgcgcgctgccgccacccgactcgccctacgtcaccctatgttgagggtacagttcctgcctgacggtacacaaaggatccctccagccgcaggctcgcgggactttcccatcagcgttgcggatcttcgtcacgtagctcctgacgttgtcgatcaacggctcgcgggtattagagacgcaaagtctcatcaacagcttgatggagctgtcttcgagttggctctcactctcctgccaggtgaaaggacgaggctgcacgtcgacctggatatgcaagctgctgacgccatgagctacaggatcctgctggcggacttggccgcactatacgacgggagagagcccccagcactcggttacacgtatagagagtaccgccaggctattgaggccgaggaaacattaccgcaacctgttcgcgacgccgatagggactggtgggcacaaagaataccacagcttccagacccgcccgcactaccgacgcgtgccggtggtgagagagatcgccggcgctcgaccagaagatggcactggttagacccacaaacaagggacgccctcttcgcacgagcacgagctcgtggcatcacacctgcaatgacacttgcggccgcgtttgcaaatgtcctcgcgagatggtccgcctcttcccggttcttactcaatttgccccttttctcgcgccaagcgttgcatccggacgtagacctcttggtaggtgacttcacatcgtcgctgctgttagatgttgacctaggagatacagtgtctaatcttgctcggaagaaccaactgacttttacggaggactgggaacaccggcattggagcggagtagagttgctgcgagaactcaaaaggcaacagcgttacccacacggagcgcccgtggtgttcacttctaatcttgggcgcagtttatattcttctcgggcggagtcccccttgggagagcctgaatggggaatttcgcaaacaccacaggtttggatcgaccatttagcatttgagcaccatggggaagtatggctccaatgggactcgaacgacgccctcttcccacctgctttagtcgagactctgtttgacgcgtactgtcaattgataaaccagctgtgcgacgatgaatccgcatggcaaaagcccttcgcggacatgatgccggcgagtcagcgtgctattcgtgagcgggtgaacgctaccggcgcaccgatcccggagggcctcttacacgaagggatttttcggatcgctcttcaacagcctcaggcgctcgcggtaacggacatgcggtaccaatggaatagttatcgagagatgcgggaacaggtcgtcgctttggcaaatctactccgagagcgcggggtcaagccaggggactcagtcgctgtagcgcttcctcggtcagtcttcctaaccttggctctccacgcgatcgtagaggcgggtgcggcgtggcttcccctcgacacgggctatccggacgatcggttgaagatgatgctagaggatgcacgaccctctctgttaatcacaaccgacgatcaactccccaggttctcagacgtccctaatcttaccagtctatgttacaacgcgcccctcactccacaaggcagcgctcctttacaacttagtcagccgcaccataccgcttatatcatttttacgtccggttccacgggcaggccgaagggtgtaatggtgggccaaactgcaatagtgaatagactattgtggatgcaaaaccactacccgcttaccggggaggacgtagtggctcaaaagactccctgctctttcgatgtcagcgtgtgggagttcttttggccttttatagccggcgctaaattggttatggcggagccggaagctcaccgagaccctttggccatgcaacagttctttgcagagtatggagtcacaacgacgcatttcgtcccatcgatgttagccgcgttcgtagcatcattgacgccacaaactgcgagacagtcatgtgccacacttaagcaagtcttctgctctggtgaggcccttcctgcggacctatgtcgggaatggcaacagcttactggagcccccttgcacaatctttacgggccgactgaggccgcagttgacgtatcgtggtatccagcgttcggggaggagctagcccaagtgcgagggtctagtgttccaattggatacccggtgtggaacacagggttaaggatcctcgacgccatgatgcatccggtaccaccaggtgtcgctggggatttgtacctgactggcattcaactggcacagggttatctagggcggcctgacttaacagctagccgattcatagcagatccattcgctcccggagagcggatgtaccgaacaggcgacgtggcacgctggttagataatggcgctgtcgagtatcttgggcggtcagacgatcagttaaagatacgtggacaacggattgagcttggtgaaatagaccgagttatgcaggcactaccagatgtcgagcaagccgtagcctcttgtgccattgcgcgagaagacattcccgggaacaagcacttggttgcgtacatagtgccgcaagaggagcagacctgcacagagcggtcacgttcaactctcacagtttccttcgtccgttctttcttaaaggagaaactaccagaatatatggtaccgtccgcgatcgtgatattagacgctctgccactcacgccaaatggaaagttggatagaagagctctgcctgctcctgacttgcactcgcaactcctggataaatacgttgctcccagaaacccaatagagactattatcgcggcagcattctcttcattgcttggatgcgacgtccaagatgcggacgcagatttctttgcgctcgggggccatagtctattggccatgaagctcgcagcgcaattgtcgagacaggtagcacggcaagtaacgcccgggcaagtcatggtcgcctcgacagtcgcgaaactcgcgaccattatcgacgctgagacatccggggaagataaccctatccccctatgtcaaggcgatggggaggagatgagcacatggctacgtcgttttggacccccagtcgaacatcgggccaggctagtgtgtttcccccacgcaggcgcagcggcggattcatacttagacctagcaagagcgttagcaccagagatcgatgttcatgctgttcaataccccggcaggcaagacagaagggacgaggagccattaggaaccgcaggtgaaattgcagatgaagtggcagcggtgctacgtgcgtcgggaggggatgggccttttgcacttttcggccacagtatgggcgccctcatcgcgtacgagacagcaaggcgattagagagggaaccgggagggggacccttacgtttattcgtgagcggacaaacagcgccacgtgtccatgaacgaagaactgatctgcccggtgacgatggactcgtggacgagcttaggcgacttggcacctccgaggcagcgctcgcagacgaagccctgctggctatgtctctcccggtgctcagggcggattatagggtgttaagatcctacgcttgggcggatggtcccccactacgcgccggtataactgccctctgcggtgatgcagacccactaactgcaacaggggatgcggaacgctggttacaacattccgtgattccgggtcggacacggacatttcccggtgggcatttttatttaggggaacaagtgaccgaggtggcaggggctgtccgtagagatttactgagagcagggttagcgggttga

SEQ ID NO: 18 - DNA, 13284 bp, Artificial Sequence
  MCH
atgaacccaccctgcgggccagtccgtgcgaattgcgtacacatatccatagatttccccatgccagtttccaaagtttccggtcctcgatcaaggacaaccagccggaggacacccgtccggattggggccgtggtggtggcaagctcgactagcgaactccttgatgggctcgcagcggttgctgatggtaggccacacgccagcgtagttaggggcgttgcgcgcccttctgcgccggttgtattcgttttcccaggtcaaggagcgcaatgggctgggatggcgggggagctactcggggagagtcgggtctttgcagccgctatggacgcctgcgcgagggcgttcgaacctgtaaccgattggacattggcccaagttttggattcaccagagcaatcccggcgtgtagaggtcgtccaacccgccctttttgcagtgcagacctctttggctgcactctggagatctttcggcgtgacacccgacgcagtcgtagggcactctatcggggagcttgcggcggcgcacgtctgtggggcagccggggcagctgacgcggcaagagctgccgcactgtggtcacgagaaatgatcccactagtggggaacggtgacatggcggcggttgcactctcggcagatgagattgaaccacggatcgcccgttgggacgacgacgtcgtgcttgctggtgttaatggtccccgctcggttttactaaccggcagccctgaaccagtagcaagaagggtacaagaactttcggcagagggagttcgggcacaggtcattaatgtgagcatggcggcccattccgcgcaggtggacgatattgcagaagggatgagatcggctctggcgtggtttgccccaggcgggtccgaagttccattttacgccagcctcactgggggagccgtggacacgcgagaactcgttgcggattactggcgacgctcattcagactgcccgttcgtttcgatgaagctataagatcagccctggaagttgggccaggtacattcgtcgaggcctcaccccacccagtcctggcggctgccctacagcagacactggacgcagaggggtcgtcggcagcggtggtccccacattacagcgggggcaaggcggaatgcgtcggttcctcttggcagcggcacaggcattcactggaggagtggccgtcgattggaccgcggcctatgatgatgtggggcctaacccggccctatgtcgatcgtctcggcgcccaagacggaaaacttcgcgaccgtcaccagcttcgacgggaacaagacatagaacttgctgcgaacggctgctcgccgtcgtgaacggcgaaactgccgcattagccggacgtgaagcagatgcagaggcaacctttcgagagcttgggttagattccgttctggcggcccagctcagagctaaagtatccgcggcgataggtcgagaagtcaatattgcactactctatgaccacccaaccccgagagcactcgcagaggcacttgctgtgccggttgagcagccatttgtgcatagccctgaagatcgctatcaaccgttcgcgctgaccgacgtacagcaagcctacctggtggggcgtcagccgggatttgccctgggcggtgttggctctcatttcttcgtcgaattcgagattgcagatttagacttgacccgcctggaaacggtttggaaccgtttaatagcacgccacgatatgttgcgtgctattgtacgtgacggtcagcaacaggtgctggaacagaccccgccatgggtgatcccggcgcatactctgcacacaccagaagaggcattacgagttagagaaaaactggctcatcaggtcttaaaccctgaagtctggcccgtatttgatctgcaagtgggctatgttgacggtatgccggcacgtctttggctctgcctagataatctattattggacgggctgagtatgcagattcttctcgccgaactggagcacggatatcgttaccctcaacagctactgcctcccctgccagttacctttcgtgattacttgcaacagccgagccttcagtctccgaacccagacagcctggcatggtggcaggctcaactggatgacatcccgccagcaccggctctcccactgcgttgtctgccacaggaagtggagactcctcgattcgcacggcttaatggcgctctcgattcaacacgttggcatcgtctgaaaaagcgcgcggccgacgcgcacctgactccgtcggccgtgttattgagtgtttggtccacagtcctgtcagcatggtcggctcagccggaatttactttaaacttgacacttttcgatcgtcgccctctgcatccccagattaatcaaatcttgggcgattttacctcacttatgcttctctcgtggcatccgggtgaatcctggctgcacagcgcgcagtctctgcaacagcgcttaagtcaaaacttgaatcaccgtgatgtttccgccattcgcgtcatgcggcagctggcgcaacagcaaaatgtcccggccgtacctatgcccgtggttttcacctctgcgctgggctttgaacaggataacttcctggcccggcgaaatctactgaaaccggtatggggtattagccagacgccgcaagtctggctggatcatcagatctatgaatctgagggcgaactgcgttttaactgggatttcgttgcagctctgtttccggcgggtcaggtggagcgtcagttcgaacaatactgcgcattattgaatcgcatggctgaggatgaaagcgggtggcagctcccgctggcggccctggtgcctcccgttaaacatgcgggtcagtgcgccgagcgcagcccgcgtgtttgtccagaacagtctcaaccgcacatcgcagctgatgaaagtactgtttccctgatatgtgacgcatttcgtgaggtcgtaggggaaagtgtgaccccggctgagaactttttcgaagcgggagccacgtccttaaatttggtacagctgcatgtgcttctccaacgtcacgaattttcaaccctgacgctactggatttattcacgcacccgtcgccagcggcccttgcggactatctcgcgggtgtcgccaccgtagaaaaaacgaagaggcctcggcccgtgagaaggcgtcagcgccggatcggagagccgttcccactcgctcctatgcaacacgccatgtgggtagggcggcacgaccaccaacagctcgggggagtagcaggccatctttacgtcgagtttgacggcgcgagagtcgaccccgatcggttgcgcgctgccgccacccgactcgccctacgtcaccctatgttgagggtacagttcctgcctgacggtacacaaaggatccctccagccgcaggctcgcgggactttcccatcagcgttgcggatcttcgtcacgtagctcctgacgttgtcgatcaacggctcgcgggtattagagacgcaaagtctcatcaacagcttgatggagctgtcttcgagttggctctcactctcctgccaggtgaaaggacgaggctgcacgtcgacctggatatgcaagctgctgacgccatgagctacaggatcctgctggcggacttggccgcactatacgacgggagagagcccccagcactcggttacacgtatagagagtaccgccaggctattgaggccgaggaaacattaccgcaacctgttcgcgacgccgatagggactggtgggcacaaagaataccacagcttccagacccgcccgcactaccgacgcgtgccggtggtgagagagatcgccggcgctcgaccagaagatggcactggttagacccacaaacaagggacgccctcttcgcacgagcacgagctcgtggcatcacacctgcaatgacacttgcggccgcgtttgcaaatgtcctcgcgagatggtccgcctcttcccggttcttactcaatttgccccttttctcgcgccaagcgttgcatccggacgtagacctcttggtaggtgacttcacatcgtcgctgctgttagatgttgacctaggagatacagtgtctaatcttgctcggaagaaccaactgacttttacggaggactgggaacaccggcattggagcggagtagagttgctgcgagaactcaaaaggcaacagcgttacccacacggagcgcccgtggtgttcacttctaatcttgggcgcagtttatattcttctcgggcggagtcccccttgggagagcctgaatggggaatttcgcaaacaccacaggtttggatcgaccatttagcatttgagcaccatggggaagtatggctccaatgggactcgaacgacgccctcttcccacctgctttagtcgagactctgtttgacgcgtactgtcaattgataaaccagctgtgcgacgatgaatccgcatggcaaaagcccttcgcggacatgatgccggcgagtcagcgtgctattcgtgagcgggtgaacgctaccggcgcaccgatcccggagggcctcttacacgaagggatttttcggatcgctcttcaacagcctcaggcgctcgcggtaacggacatgcggtaccaatggaatagttatcgagagatgcgggaacaggtcgtcgctttggcaaatctactccgagagcgcggggtcaagccaggggactcagtcgctgtagcgcttcctcggtcagtcttcctaaccttggctctccacgcgatcgtagaggcgggtgcggcgtggcttcccctcgacacgggctatccggacgatcggttgaagatgatgctagaggatgcacgaccctctctgttaatcacaaccgacgatcaactccccaggttctcagacgtccctaatcttaccagtctatgttacaacgcgcccctcactccacaaggcagcgctcctttacaacttagtcagccgcaccataccgcttatatcatttttacgtccggttccacgggcaggccgaagggtgtaatggtgggccaaactgcaatagtgaatagactattgtggatgcaaaaccactacccgcttaccggggaggacgtagtggctcaaaagactccctgctctttcgatgtcagcgtgtgggagttcttttggccttttatagccggcgctaaattggttatggcggagccggaagctcaccgagaccctttggccatgcaacagttctttgcagagtatggagtcacaacgacgcatttcgtcccatcgatgttagccgcgttcgtagcatcattgacgccacaaactgcgagacagtcatgtgccacacttaagcaagtcttctgctctggtgaggcccttcctgcggacctatgtcgggaatggcaacagcttactggagcccccttgcacaatctttacgggccgactgaggccgcagttgacgtatcgtggtatccagcgttcggggaggagctagcccaagtgcgagggtctagtgttccaattggatacccggtgtggaacacagggttaaggatcctcgacgccatgatgcatccggtaccaccaggtgtcgctggggatttgtacctgactggcattcaactggcacagggttatctagggcggcctgacttaacagctagccgattcatagcagatccattcgctcccggagagcggatgtaccgaacaggcgacgtggcacgctggttagataatggcgctgtcgagtatcttgggcggtcagacgatcagttaaagatacgtggacaacggattgagcttggtgaaatagaccgagttatgcaggcactaccagatgtcgagcaagccgtagcctcttgtgccattgcgcgagaagacattcccgggaacaagcacttggttgcgtacatagtgccgcaagaggagcagacctgcacagagcggtcacgttcaactctcacagtttccttcgtccgttctttcttaaaggagaaactaccagaatatatggtaccgtccgcgatcgtgatattagacgctctgccactcacgccaaatggaaagttggatagaagagctctgcctgctcctgacttgcactcgcaactcctggataaatacgttgctcccagaaacccaatagagactattatcgcggcagcattctcttcattgcttggatgcgacgtccaagatgcggacgcagatttctttgcgctcgggggccatagtctattggccatgaagctcgcagcgcaattgtcgagacaggtagcacggcaagtaacgcccgggcaagtcatggtcgcctcgacagtcgcgaaactcgcgaccattatcgacgctgagcctggaattggggcgctagttcccgctcccgtggtaatcgcagcaggccgtacggaggaaccaattgccatagtatccatggcttgccggttacccggtggtgtgaataccccacagagactatgggaattattacgtgaagggggagaaaccctcagtggcttccctaccgaccgagggtgggacctcgcgaggttgcatcacccagacccagacaaccccggtacgtcatacgttgataaagggggattcctggacgatgcggcagggtttgacgcagaatttttcggtgtgagccccagagaagcagcggctatggacccgcagcagagattactcctcgaaaccagctgggagttagtcgagaatgcagggattgatccacatagcctaagggggaccgccactggtgtcttcctcggcgttgccaagtttgggtatggcgaggatacggcagctgccgaagacgtcgaggggtactctgtcactggtgtagccccggcagtggcgtcgggcagaattagttacacgatggggttggaagggccgtctatttcggttgataccgcctgttcctccagtctggttgcactccaccttgcagtcgagtcgctccggaaaggagaaagcagtatggccgtggtcgggggagcggcggtgatggccacaccgggtgtgtttgtggatttttcccgacagagagccttggccgcggatgggcgttcaaaggcgttcggagcaggtgcagacgggtttggatttagcgaaggtgtgacactggttctcctagaaagattaagtgaagcccggcgtaacggccatgaggtgctggcagttgttagaggttccgcattaaaccaggacggggcttcgaacgggctgagcgccccctcgggcccggcacagagaagagtgatacgccaagcactcgaatcgtgtggcctagaaccaggtgacgttgacgcggtggaagcgcacgggacaggaactgcgttaggggacccgatagaagcaaacgccttgctggacacttatggtagagatcgtgatgcggatcgacccctctggttaggaagtgttaagtcaaatataggacacactcaggcagcggcgggagtaactgggctgctcaaagtagtcctagccttacgcaatggggaactacccgccaccctacatgtcgaggaaccgacaccgcatgtggattggtcgagcgggggagttgctctcttggcgggtaatcagccgtggcgaagaggtgaacgaacccgtagagccgccgtgtccgcattcgggatcagtggtacgaacgcgcacgtgattgtggaagaagctccacaagaggtgagaccagcgcccggtcaaggactctcgcccgcggtgtcaaccttggtagtggcgggtaaaactatgcagcgtgtttcggcaaccgccggtatgctcgcagattggatggaaggcccaggtgcagatgtggcgctggcggacgtggcgcacacgttaaatcatcaccgttcacggcaaccaaagttcggtacggtggtggccagggaccggacacaggcaatcgccggactaagagcgctggcggcgggtcagcacgccccaggggttgttaaccctgctgaaggaagtccaggtccagggacggtgttcgtgtttcctggccaggggtcccagcgtgcaggcatgggggaggagttggctgcggctttccccgtgtttgccagaatccaccagcaagtgtgggatttactcgatgttcctgatctcgacgttaacgaaacggggtacgcacaaccagcactcttcgcactccaagtggcgctgtttgggctcctcgaatcatggggagtacggccggatgccgtggtcgggcatagtgtaggggaattagcggcagggtacgtttccgggctttggagtcttgaggatgcttgcacgctcgtgtcggcgagagcccgtctaatgcaagccttaccggcaggtggtgttatggcggcagttccagtgtccgaagacgaagcacgggctgtgttgggggaaggagtcgaaatagctgcggtcaacggtccgtcgagcgtggttctaagcggtgatgaagcagcagtgctccaggccgcggaagggttaggcaagtggacgcgattaccgacctcgcatgcattccattctgctcgtatggaaccaatgctggaagagtttagagcagtggcggaaggtctaacatacaggactccccaggtggcaatggccgccggagaccaggttatgaccgctgaatactgggtgcgtcaggttagggatacagttcgttttggcgagcaagttgcctcgttcgaggatgctgtattcgtggaattgggagcagatcgctctcttgcacggctagtcgatggtatcgcgatgttgcacggggatcatgaggcacaggctggtatgcggagagaacaacccttgcccttaggtttacgaagattgctaaccgacctgcataacgctggtgctgccgtcgattttagtgttttgtgcccacaaggtcgtctggttgacgcaccgttaccagcctggtcacaccggtttctcttctatgaccgggaaggagtggacaatagatcaccagggggaagcacagtggcggtccacccgcttttactagccgcggtggatgtgccgggccacggtggagcggttttcacgggtagactctcgactgacgagcaaccgtggttagcggagcacgttgtcgggggaagaaccctagttcctggttctgttttagtcgatctagccttagcggcaggcgaagacgtagggctaccggtgttagaagaattagtattgcagaggccgctggtgcttgccggcgcgggagcactcctacggatgtcggtcggggcaccagacgagagcggtagaagaactatcgatgttcacgcagctgaagacgtcgccgatttagcagatgcccaatggtcccagcacgccaccgggactttagcccaaggggtagcggcggggcccagggacacagagcaatggcccccagaggatgccgtccggattccattagacgaccattatgatggtctcgcggaacagggttatgagtacggtccgtcgtttcaggcgctagtggcctacgtggcggaggatgcgactgcgacaatgttagcggaagtcgcgcttccgggcagcattagatcgcaacaaggtctatacgccatccatcccgcactgctggacgcttgttttcaatctgtcggagcccacccagacagtcaatccgtcgggtcaggtctactcgtacccctcggtgttcggagagttcgtgcgtacgcacccgtaaggaccgcccgttattgttacacccgcgtcacgaaagttgaactagctggggttgaggccgacatcgacgttctggatgctcacggcacagtgcttctagccgtgtgcggtcttcgtatcgggaccggagtgagcgagagggacaaacacaacagagttctcaatgagcgcctactcaccatcgaatggcatcagcgtgaactaccagaaatggacccctcgggtgccgggaagtggctcctaatctcggactgtgcagcatccgatgtcaccgctacacgactggctgatgccttccgggagcacagcgctgcgtgcactaccatgcggtggccacttcacgatgatcaactagcagccgccgaccaactccgggaccaggtgggttcagatgagttttctggcgtggtagtactaacagggccaaacacagggacccctcatcagggttccgcagaccgtggcgccgagtacgttaggcggttagttggaatcgctcgtgaacttagcgatcttcccggagcggttccccgtatgtatgtcgtcacaaggggagcgcagagagtccttgccgatgattgtgttaatttagaacagggagggctcagaggtctgctgaggaccatcggtgctgagcacccacatctccgcgccacccaaattgatgttgatgagcagacaggagtagagcagctggcgcgacaactcctagctacatcggaggaagacgagacagcctggagggacaacgaatggtacgttgcgaggttatgccccacacccctgaggccacaggaacgtaggacaatagtggcggaccatcaacagtctggtatgcggttacaaatacgtacgcccggtgcaatcgatagtgtggcctttgaacccgcacccgatgtagagcaacccttacgggcgggtgaagttcgggttgacgttagagcaaccggtgttaatttccgtgacgttctactcgctctcgggatgtatccccagaaagctgacatggggacagaagcagctggtgttgtaacagcagtgggacctgatgtcgatgcgtttgcgcctggtgatagagttctagggctattccaaggggcatttgctccaattgcggtgactgaccatcgtttactggcacgggtgccagacgggtggtcagatgccgatgcggcggcggtgccaatagcttacacgacagcacattatgcgctgcacgacctggcggggttgcgggcggggcaatctgtcctgatacacgcggcagcgggtggtgttggtatggccgctgttgcactggcacggagggccggcgcagaagttctggctaccgcaggacctgcaaaacacggtacgctacgggcattagggctagatgatgaacacatcgcttcgagtcgggagaccgggttcgcgcgtaagttccgagagcggactgggggacgaggagtggacgtcgttctaaacagcttgaccggcgaactattagacgagtccgcggatctcctcgcggaggacggagtcttcgtggaaatgggaaagactgatctgcgcgatgcaggggactttcgtgggcgctacgccccgtttgatctaggggaagcaggcgatgacaggctcggggaaattctacgtgaggtggtgggactgctcggtgcaggggaactcgaccgactccctgttagcgcgtgggaattggggataccccagacggggaagtcgttagtgacgctgccacccgaacaagcgcaagttttcagaccagacggcactgtattgatcaccgggggaacgggaacgttaggtcggctgctggcccgtcatctggttacagagcacggggtgcgtcacctgctgctagtgtcgaggagaggagcagatgcccctggatcggacgagctgagggccgaaatcgaggatctcggagcatcagcggaaattgcagcatgtgatacagccgatcgagacgctctcagcgcgttgctagatggactgccgaggccactgaccggagtagttcacgccgcgggagtcctcgctgacggtctggttacatccatcgacgagcccgcagtcgaacaagttctccgtgcaaaagttgatgcggcctggaacctgcacgagctaactgcgaacaccggtctcagctttttcgtgctgttctcgtcagccgcaagtgtgttagcggggccggggcagggagtatatgcggcagcgaacgaatctttaaacgctctggccgctctgcgtaggactaggggtttacccgcaaaagcattgggatggggattatgggcgatagggcgtgcaatagcatttgccgagcagaccggtgacgcaatcgccccggaggaaggcgcgtacgccttcgagacactactcagacataacagggcgtactcgggttacgctcccgtgatagggtcaccatggctgactgcgttcgcccaacattcgccctttgcggagaagttccagtccctggggcaaaatagatccgggacgtctaagtttctggcagaattagtcgatctgccaagagaagaatggccagatcggttacgtcgtctattagaactggtgaggtctcatgctgccgcagtttcggggtatggatcggcagaccaattaccagaaagaaaagcattcaaagacctcggattcgattcactggcagcagtcgaactaagaaatcgtctagggaccgcgacaggcgtccggctgcccagtactctggtgttcgaccacccaaccccacttgcggttgcggaacatctacgtgatcgtctaacatccggggaagataaccctatccccctatgtcaaggcgatggggaggagatgagcacatggctacgtcgttttggacccccagtcgaacatcgggccaggctagtgtgtttcccccacgcaggcgcagcggcggattcatacttagacctagcaagagcgttagcaccagagatcgatgttcatgctgttcaataccccggcaggcaagacagaagggacgaggagccattaggaaccgcaggtgaaattgcagatgaagtggcagcggtgctacgtgcgtcgggaggggatgggccttttgcacttttcggccacagtatgggcgccctcatcgcgtacgagacagcaaggcgattagagagggaaccgggagggggacccttacgtttattcgtgagcggacaaacagcgccacgtgtccatgaacgaagaactgatctgcccggtgacgatggactcgtggacgagcttaggcgacttggcacctccgaggcagcgctcgcagacgaagccctgctggctatgtctctcccggtgctcagggcggattatagggtgttaagatcctacgcttgggcggatggtcccccactacgcgccggtataactgccctctgcggtgatgcagacccactaactgcaacaggggatgcggaacgctggttacaacattccgtgattccgggtcggacacggacatttcccggtgggcatttttatttaggggaacaagtgaccgaggtggcaggggctgtccgtagagatttactgagagcagggttagcgggttga

SEQ ID NO: 19 - DNA, 11631 bp, Artificial Sequence
  MCO
atgaacccaccctgcgggccagtccgtgcgaattgcgtacacatatccatagatttccccatgccagtttccaaagtttccggtcctcgatcaaggacaaccagccggaggacacccgtccggattggggccgtggtggtggcaagctcgactagcgaactccttgatgggctcgcagcggttgctgatggtaggccacacgccagcgtagttaggggcgttgcgcgcccttctgcgccggttgtattcgttttcccaggtcaaggagcgcaatgggctgggatggcgggggagctactcggggagagtcgggtctttgcagccgctatggacgcctgcgcgagggcgttcgaacctgtaaccgattggacattggcccaagttttggattcaccagagcaatcccggcgtgtagaggtcgtccaacccgccctttttgcagtgcagacctctttggctgcactctggagatctttcggcgtgacacccgacgcagtcgtagggcactctatcggggagcttgcggcggcgcacgtctgtggggcagccggggcagctgacgcggcaagagctgccgcactgtggtcacgagaaatgatcccactagtggggaacggtgacatggcggcggttgcactctcggcagatgagattgaaccacggatcgcccgttgggacgacgacgtcgtgcttgctggtgttaatggtccccgctcggttttactaaccggcagccctgaaccagtagcaagaagggtacaagaactttcggcagagggagttcgggcacaggtcattaatgtgagcatggcggcccattccgcgcaggtggacgatattgcagaagggatgagatcggctctggcgtggtttgccccaggcgggtccgaagttccattttacgccagcctcactgggggagccgtggacacgcgagaactcgttgcggattactggcgacgctcattcagactgcccgttcgtttcgatgaagctataagatcagccctggaagttgggccaggtacattcgtcgaggcctcaccccacccagtcctggcggctgccctacagcagacactggacgcagaggggtcgtcggcagcggtggtccccacattacagcgggggcaaggcggaatgcgtcggttcctcttggcagcggcacaggcattcactggaggagtggccgtcgattggaccgcggcctatgatgatgtggggcctaacccggccctatgtcgatcgtctcggcgcccaagacggaaaacttcgcgaccgtcaccagcttcgacgggaacaagacatagaacttgctgcgaacggctgctcgccgtcgtgaacggcgaaactgccgcattagccggacgtgaagcagatgcagaggcaacctttcgagagcttgggttagattccgttctggcggcccagctcagagctaaagtatccgcggcgataggtcgagaagtcaatattgcactactctatgaccacccaaccccgagagcactcgcagaggcacttgctgtgccggttgagcagccatttgtgcatagccctgaagatcgctatcaaccgttcgcgctgaccgacgtacagcaagcctacctggtggggcgtcagccgggatttgccctgggcggtgttggctctcatttcttcgtcgaattcgagattgcagatttagacttgacccgcctggaaacggtttggaaccgtttaatagcacgccacgatatgttgcgtgctattgtacgtgacggtcagcaacaggtgctggaacagaccccgccatgggtgatcccggcgcatactctgcacacaccagaagaggcattacgagttagagaaaaactggctcatcaggtcttaaaccctgaagtctggcccgtatttgatctgcaagtgggctatgttgacggtatgccggcacgtctttggctctgcctagataatctattattggacgggctgagtatgcagattcttctcgccgaactggagcacggatatcgttaccctcaacagctactgcctcccctgccagttacctttcgtgattacttgcaacagccgagccttcagtctccgaacccagacagcctggcatggtggcaggctcaactggatgacatcccgccagcaccggctctcccactgcgttgtctgccacaggaagtggagactcctcgattcgcacggcttaatggcgctctcgattcaacacgttggcatcgtctgaaaaagcgcgcggccgacgcgcacctgactccgtcggccgtgttattgagtgtttggtccacagtcctgtcagcatggtcggctcagccggaatttactttaaacttgacacttttcgatcgtcgccctctgcatccccagattaatcaaatcttgggcgattttacctcacttatgcttctctcgtggcatccgggtgaatcctggctgcacagcgcgcagtctctgcaacagcgcttaagtcaaaacttgaatcaccgtgatgtttccgccattcgcgtcatgcggcagctggcgcaacagcaaaatgtcccggccgtacctatgcccgtggttttcacctctgcgctgggctttgaacaggataacttcctggcccggcgaaatctactgaaaccggtatggggtattagccagacgccgcaagtctggctggatcatcagatctatgaatctgagggcgaactgcgttttaactgggatttcgttgcagctctgtttccggcgggtcaggtggagcgtcagttcgaacaatactgcgcattattgaatcgcatggctgaggatgaaagcgggtggcagctcccgctggcggccctggtgcctcccgttaaacatgcgggtcagtgcgccgagcgcagcccgcgtgtttgtccagaacagtctcaaccgcacatcgcagctgatgaaagtactgtttccctgatatgtgacgcatttcgtgaggtcgtaggggaaagtgtgaccccggctgagaactttttcgaagcgggagccacgtccttaaatttggtacagctgcatgtgcttctccaacgtcacgaattttcaaccctgacgctactggatttattcacgcacccgtcgccagcggcccttgcggactatctcgcgggtgtcgccaccgtagaaaaaacgaagaggcctcggcccgtgagaaggcgtcagcgccggatcggagagccgttcccactcgctcctatgcaacacgccatgtgggtagggcggcacgaccaccaacagctcgggggagtagcaggccatctttacgtcgagtttgacggcgcgagagtcgaccccgatcggttgcgcgctgccgccacccgactcgccctacgtcaccctatgttgagggtacagttcctgcctgacggtacacaaaggatccctccagccgcaggctcgcgggactttcccatcagcgttgcggatcttcgtcacgtagctcctgacgttgtcgatcaacggctcgcgggtattagagacgcaaagtctcatcaacagcttgatggagctgtcttcgagttggctctcactctcctgccaggtgaaaggacgaggctgcacgtcgacctggatatgcaagctgctgacgccatgagctacaggatcctgctggcggacttggccgcactatacgacgggagagagcccccagcactcggttacacgtatagagagtaccgccaggctattgaggccgaggaaacattaccgcaacctgttcgcgacgccgatagggactggtgggcacaaagaataccacagcttccagacccgcccgcactaccgacgcgtgccggtggtgagagagatcgccggcgctcgaccagaagatggcactggttagacccacaaacaagggacgccctcttcgcacgagcacgagctcgtggcatcacacctgcaatgacacttgcggccgcgtttgcaaatgtcctcgcgagatggtccgcctcttcccggttcttactcaatttgccccttttctcgcgccaagcgttgcatccggacgtagacctcttggtaggtgacttcacatcgtcgctgctgttagatgttgacctaggagatacagtgtctaatcttgctcggaagaaccaactgacttttacggaggactgggaacaccggcattggagcggagtagagttgctgcgagaactcaaaaggcaacagcgttacccacacggagcgcccgtggtgttcacttctaatcttgggcgcagtttatattcttctcgggcggagtcccccttgggagagcctgaatggggaatttcgcaaacaccacaggtttggatcgaccatttagcatttgagcaccatggggaagtatggctccaatgggactcgaacgacgccctcttcccacctgctttagtcgagactctgtttgacgcgtactgtcaattgataaaccagctgtgcgacgatgaatccgcatggcaaaagcccttcgcggacatgatgccggcgagtcagcgtgctattcgtgagcgggtgaacgctaccggcgcaccgatcccggagggcctcttacacgaagggatttttcggatcgctcttcaacagcctcaggcgctcgcggtaacggacatgcggtaccaatggaatagttatcgagagatgcgggaacaggtcgtcgctttggcaaatctactccgagagcgcggggtcaagccaggggactcagtcgctgtagcgcttcctcggtcagtcttcctaaccttggctctccacgcgatcgtagaggcgggtgcggcgtggcttcccctcgacacgggctatccggacgatcggttgaagatgatgctagaggatgcacgaccctctctgttaatcacaaccgacgatcaactccccaggttctcagacgtccctaatcttaccagtctatgttacaacgcgcccctcactccacaaggcagcgctcctttacaacttagtcagccgcaccataccgcttatatcatttttacgtccggttccacgggcaggccgaagggtgtaatggtgggccaaactgcaatagtgaatagactattgtggatgcaaaaccactacccgcttaccggggaggacgtagtggctcaaaagactccctgctctttcgatgtcagcgtgtgggagttcttttggccttttatagccggcgctaaattggttatggcggagccggaagctcaccgagaccctttggccatgcaacagttctttgcagagtatggagtcacaacgacgcatttcgtcccatcgatgttagccgcgttcgtagcatcattgacgccacaaactgcgagacagtcatgtgccacacttaagcaagtcttctgctctggtgaggcccttcctgcggacctatgtcgggaatggcaacagcttactggagcccccttgcacaatctttacgggccgactgaggccgcagttgacgtatcgtggtatccagcgttcggggaggagctagcccaagtgcgagggtctagtgttccaattggatacccggtgtggaacacagggttaaggatcctcgacgccatgatgcatccggtaccaccaggtgtcgctggggatttgtacctgactggcattcaactggcacagggttatctagggcggcctgacttaacagctagccgattcatagcagatccattcgctcccggagagcggatgtaccgaacaggcgacgtggcacgctggttagataatggcgctgtcgagtatcttgggcggtcagacgatcagttaaagatacgtggacaacggattgagcttggtgaaatagaccgagttatgcaggcactaccagatgtcgagcaagccgtagcctcttgtgccattgcgcgagaagacattcccgggaacaagcacttggttgcgtacatagtgccgcaagaggagcagacctgcacagagcggtcacgttcaactctcacagtttccttcgtccgttctttcttaaaggagaaactaccagaatatatggtaccgtccgcgatcgtgatattagacgctctgccactcacgccaaatggaaagttggatagaagagctctgcctgctcctgacttgcactcgcaactcctggataaatacgttgctcccagaaacccaatagagactattatcgcggcagcattctcttcattgcttggatgcgacgtccaagatgcggacgcagatttctttgcgctcgggggccatagtctattggccatgaagctcgcagcgcaattgtcgagacaggtagcacggcaagtaacgcccgggcaagtcatggtcgcctcgacagtcgcgaaactcgcgaccattatcgacgctgagcctggaattggggcgctagttcccgctcccgtggtaatcgcagcaggccgtacggaggaaccaattgccatcgtttcgatggcatgtcgtttaccgggaggagtcaatacgccccaacggctctgggaattactacgggagggtggtgaaaccttgtccgggttcccaacggaccgtggctgggacctagcacggcttcaccaccctgatccggacaaccccggaacgagctacgttgataagggtggatttctcgacgacgcggcgggtttcgacgcagagtttttcggggtttcaccaagggaagctgccgctatggaccctcagcaacgattacttttagagacctcgtgggagctagttgaaaatgcgggcatagatccacatagcctgcgagggacagcgacaggggtgttcctaggagttgcgaagtttggttatggtgaggacacagcagcagcggaagatgttgaaggttattcagttaccggtgttgctcccgctgtggcatctggccgcatatcctacactatgggtttagaaggtccttccatctcggtcgataccgcatgctcaagctcgctagtcgcgcttcatctagccgtagagtccctccgaaagggtgagtcatctatggcggtggtgggtggtgcagccgttatggcgactcctggggtatttgttgatttttcacgccaacgggcgcttgccgcagacggccgttccaaagcgttcggggcaggtgcagatggttttggtttcagcgagggagtcacgctggttctactagagcgtttaagtgaggcgcgtcgtaacggtcatgaagttctagctgtagtgcgcgggtccgcgttaaaccaggacggagcgagcaacggactttcagcaccctccggccctgcgcaacgtagagtaataaggcaagcgctcgaatcgtgtgggcttgaaccgggggatgttgacgcggttgaggcgcatggtactggtacagcactaggtgacccaatagaggccaatgcgctgttggacacttacgggcgagaccgtgatgcggatcgtccactttggttggggtccgttaagagcaatattgggcacactcaagctgcggccggggttacaggactgctgaaggttgtgttagcactgcgcaatggtgagctacctgcaacgttacatgtcgaggaaccaactccacacgtcgattggtcctcaggtggtgtcgcattactggcgggtaatcaaccatggcgaaggggagaaaggaccagaagggcggcagtgagcgcctttggtatctccggtacaaatgctcacgtgatagtggaagaggcgcctcaggaagttcgacccgcccctggccaagggctgtcgccagccgtgtccacgttagttgttgcaggtaaaaccatgcagcgtgtaagtgcgacagctggaatgcttgcagactggatggagggtcctggggccgatgttgcattggcggatgtggcccataccctgaaccatcaccgatcaagacagcccaagttcgggacggttgtagcgcgtgacaggactcaggcgatagctgggctccgtgcattggcggctggtcaacatgctcctggggtcgtcaacccagctgaaggttccccaggaccaggcaccgtgttcgtttttcccggtcaaggttcgcagagggcagggatgggggaggaactcgcggcagcctttcctgtcttcgctcgaatacatcagcaagtttgggacctcctagatgttcccgacctcgacgttaatgaaaccgggtacgcccaaccagcgctgttcgcgcttcaggtcgcgctctttggccttctggagtcgtggggtgttaggccagatgcagtggtagggcactcagttggtgagctggccgcggggtacgtgtccggtctttggtcactagaggacgcctgcacactagtctcagcaagagcgcgcctaatgcaggcactgcctgctggaggggtgatggcggcagtccccgtctccgaggatgaggcgcgggccgtcctgggcgagggagttgaaattgcggctgtgaatggaccctcgtccgttgtgctctcaggggacgaggcggcagtcttacaggccgccgaaggtctaggtaagtggacgcgactgccgaccagccatgcttttcactcagcgagaatggaacccatgctagaagagtttcgggccgtagcagagggtctgacctatcgtacccctcaagtagctatggctgctggggatcaggtgatgacagcagaatattgggtgcggcaggttcgggacacagttcgcttcggggagcaagtagcgtcattcgaggatgcggtgtttgttgagttaggcgctgacagaagtctagcgcgtttggtggacggcatcgccatgctgcacggtgaccacgaagcgcaggccgcggaccataggcaaatcaccgaagcggttgcggatgcttacgtcttaggccaccttccggattttgcggcgctgcggcggcctcacgcacgaaagttggacttaccaacttatcccttcgagcgtagacagtactggttcagagatgcgcgtgagaggccggaacaacccagagataccggcggacctcgcacagaagcagtccgtctgttagaggatggtaggattgaagaattagctgcacttttgggaggggccagtgatgaccaacacacattacaggtgctgactaagttggcggcgcaacataaccaacaacgaacaacccggtcaatcgctgacgacaggtacgaaataaggtgggaccgatcgacttccccactatccggagcagatgttgaccaagcggggagctggatcgtggtgtcagatgacgcagatgccgttcccccgctagtggacttgctggctgcacgtaacgagccccatcaggttgttggtctacccgcttcggacgcagacgaggagaggctcgcagagactctgcgtgcggctgcgactgaagatgctacccttcggatagtccacgttgcggcgctcgaagcaggcgctacccccagcatgcgttcactgctccgcatgcagcaccgaatactaggtggcacgcggcgggtgttcagggcagcggtcgcagcggagttaagaggtcccatttggatagtgacgcggggagcacaaagagtggctgacaccgatacagttgccccgcatcagtcatgcctctggggatttgggagggcagcatcgctggagctgccgcacgtttggggtggcctagcagatttatcagagggcggtgacaatgcggccgatgagtggagtgcgctagtggaccgcattgccgcaccccacggttcagcagttagggaggaccaactggcgctgagagacagggccgtatatacgccaagactggccagacgttctgcgcccccgagcgggactcccctacatctacgaggggatggcacagtgttaataacaggtgggactggtacactaggtaggctattagcgcgtcacctagtaacagagcatggggtgcggcatctcttactagtttcaaggagaggcgccgatgcccctggctcggatgaactgcgcgcagaaatagaggacttaggtgccagcgcggagatcgcagcgtgtgatacagcggatcgcgatgccctatctgccctactagatggtctcccccggccccttacgggtgtcgttcacgccgctggcgtgttagccgatggacttgtcactagcattgacgagcctgcggtggaacaggttctccgagcaaaggtggacgcggcatggaacctacacgaactcacagctaataccgggctatcctttttcgttcttttctcatcagcagcatcggtcctggcaggtccagggcaaggagtttatgcggctgcaaatgaatcgctcaacgcactagctgcgttaaggcgaactaggggtctgccggccaaggctctgggatggggcctgtgggccatcgggcgggcaatcgcttttgcggagcagaccggggacgccatcgctccagaggaaggagcatacgcttttgaaactctgttaaggcataaccgtgcctactcgggatatgcgcccgtcattggatctccctggttgaccgcgttcgcacagcattccccctttgcagaaaaattccaatcactcggacagaatcggtcagggacatcgaaattcttagcggagctagttgacctgcctcgtgaggaatggccggataggctcaggagactactagagttagttaggtcccatgccgccgcggtctccggttacggtagtgcagatcaactgccggaaagaaaagcgttcaaggatttggggtttgattcgctggccgccgttgaactgcgtaaccggctgggaacggctacaggggtacgactgccgtcaaccctagtatttgatcacccaactccgctggccgtcgctgagcacttaagagataggctaacatccggggaagataaccctatccccctatgtcaaggcgatggggaggagatgagcacatggctacgtcgttttggacccccagtcgaacatcgggccaggctagtgtgtttcccccacgcaggcgcagcggcggattcatacttagacctagcaagagcgttagcaccagagatcgatgttcatgctgttcaataccccggcaggcaagacagaagggacgaggagccattaggaaccgcaggtgaaattgcagatgaagtggcagcggtgctacgtgcgtcgggaggggatgggccttttgcacttttcggccacagtatgggcgccctcatcgcgtacgagacagcaaggcgattagagagggaaccgggagggggacccttacgtttattcgtgagcggacaaacagcgccacgtgtccatgaacgaagaactgatctgcccggtgacgatggactcgtggacgagcttaggcgacttggcacctccgaggcagcgctcgcagacgaagccctgctggctatgtctctcccggtgctcagggcggattatagggtgttaagatcctacgcttgggcggatggtcccccactacgcgccggtataactgccctctgcggtgatgcagacccactaactgcaacaggggatgcggaacgctggttacaacattccgtgattccgggtcggacacggacatttcccggtgggcatttttatttaggggaacaagtgaccgaggtggcaggggctgtccgtagagatttactgagagcagggttagcgggttga

SEQ ID NO: 20 - DNA, 11970 bp, Artificial Sequence
  MCS
atgaacccaccctgcgggccagtccgtgcgaattgcgtacacatatccatagatttccccatgccagtttccaaagtttccggtcctcgatcaaggacaaccagccggaggacacccgtccggattggggccgtggtggtggcaagctcgactagcgaactccttgatgggctcgcagcggttgctgatggtaggccacacgccagcgtagttaggggcgttgcgcgcccttctgcgccggttgtattcgttttcccaggtcaaggagcgcaatgggctgggatggcgggggagctactcggggagagtcgggtctttgcagccgctatggacgcctgcgcgagggcgttcgaacctgtaaccgattggacattggcccaagttttggattcaccagagcaatcccggcgtgtagaggtcgtccaacccgccctttttgcagtgcagacctctttggctgcactctggagatctttcggcgtgacacccgacgcagtcgtagggcactctatcggggagcttgcggcggcgcacgtctgtggggcagccggggcagctgacgcggcaagagctgccgcactgtggtcacgagaaatgatcccactagtggggaacggtgacatggcggcggttgcactctcggcagatgagattgaaccacggatcgcccgttgggacgacgacgtcgtgcttgctggtgttaatggtccccgctcggttttactaaccggcagccctgaaccagtagcaagaagggtacaagaactttcggcagagggagttcgggcacaggtcattaatgtgagcatggcggcccattccgcgcaggtggacgatattgcagaagggatgagatcggctctggcgtggtttgccccaggcgggtccgaagttccattttacgccagcctcactgggggagccgtggacacgcgagaactcgttgcggattactggcgacgctcattcagactgcccgttcgtttcgatgaagctataagatcagccctggaagttgggccaggtacattcgtcgaggcctcaccccacccagtcctggcggctgccctacagcagacactggacgcagaggggtcgtcggcagcggtggtccccacattacagcgggggcaaggcggaatgcgtcggttcctcttggcagcggcacaggcattcactggaggagtggccgtcgattggaccgcggcctatgatgatgtggggcctaacccggccctatgtcgatcgtctcggcgcccaagacggaaaacttcgcgaccgtcaccagcttcgacgggaacaagacatagaacttgctgcgaacggctgctcgccgtcgtgaacggcgaaactgccgcattagccggacgtgaagcagatgcagaggcaacctttcgagagcttgggttagattccgttctggcggcccagctcagagctaaagtatccgcggcgataggtcgagaagtcaatattgcactactctatgaccacccaaccccgagagcactcgcagaggcacttgctgtgccggttgagcagccatttgtgcatagccctgaagatcgctatcaaccgttcgcgctgaccgacgtacagcaagcctacctggtggggcgtcagccgggatttgccctgggcggtgttggctctcatttcttcgtcgaattcgagattgcagatttagacttgacccgcctggaaacggtttggaaccgtttaatagcacgccacgatatgttgcgtgctattgtacgtgacggtcagcaacaggtgctggaacagaccccgccatgggtgatcccggcgcatactctgcacacaccagaagaggcattacgagttagagaaaaactggctcatcaggtcttaaaccctgaagtctggcccgtatttgatctgcaagtgggctatgttgacggtatgccggcacgtctttggctctgcctagataatctattattggacgggctgagtatgcagattcttctcgccgaactggagcacggatatcgttaccctcaacagctactgcctcccctgccagttacctttcgtgattacttgcaacagccgagccttcagtctccgaacccagacagcctggcatggtggcaggctcaactggatgacatcccgccagcaccggctctcccactgcgttgtctgccacaggaagtggagactcctcgattcgcacggcttaatggcgctctcgattcaacacgttggcatcgtctgaaaaagcgcgcggccgacgcgcacctgactccgtcggccgtgttattgagtgtttggtccacagtcctgtcagcatggtcggctcagccggaatttactttaaacttgacacttttcgatcgtcgccctctgcatccccagattaatcaaatcttgggcgattttacctcacttatgcttctctcgtggcatccgggtgaatcctggctgcacagcgcgcagtctctgcaacagcgcttaagtcaaaacttgaatcaccgtgatgtttccgccattcgcgtcatgcggcagctggcgcaacagcaaaatgtcccggccgtacctatgcccgtggttttcacctctgcgctgggctttgaacaggataacttcctggcccggcgaaatctactgaaaccggtatggggtattagccagacgccgcaagtctggctggatcatcagatctatgaatctgagggcgaactgcgttttaactgggatttcgttgcagctctgtttccggcgggtcaggtggagcgtcagttcgaacaatactgcgcattattgaatcgcatggctgaggatgaaagcgggtggcagctcccgctggcggccctggtgcctcccgttaaacatgcgggtcagtgcgccgagcgcagcccgcgtgtttgtccagaacagtctcaaccgcacatcgcagctgatgaaagtactgtttccctgatatgtgacgcatttcgtgaggtcgtaggggaaagtgtgaccccggctgagaactttttcgaagcgggagccacgtccttaaatttggtacagctgcatgtgcttctccaacgtcacgaattttcaaccctgacgctactggatttattcacgcacccgtcgccagcggcccttgcggactatctcgcgggtgtcgccaccgtagaaaaaacgaagaggcctcggcccgtgagaaggcgtcagcgccggatcggagagccgttcccactcgctcctatgcaacacgccatgtgggtagggcggcacgaccaccaacagctcgggggagtagcaggccatctttacgtcgagtttgacggcgcgagagtcgaccccgatcggttgcgcgctgccgccacccgactcgccctacgtcaccctatgttgagggtacagttcctgcctgacggtacacaaaggatccctccagccgcaggctcgcgggactttcccatcagcgttgcggatcttcgtcacgtagctcctgacgttgtcgatcaacggctcgcgggtattagagacgcaaagtctcatcaacagcttgatggagctgtcttcgagttggctctcactctcctgccaggtgaaaggacgaggctgcacgtcgacctggatatgcaagctgctgacgccatgagctacaggatcctgctggcggacttggccgcactatacgacgggagagagcccccagcactcggttacacgtatagagagtaccgccaggctattgaggccgaggaaacattaccgcaacctgttcgcgacgccgatagggactggtgggcacaaagaataccacagcttccagacccgcccgcactaccgacgcgtgccggtggtgagagagatcgccggcgctcgaccagaagatggcactggttagacccacaaacaagggacgccctcttcgcacgagcacgagctcgtggcatcacacctgcaatgacacttgcggccgcgtttgcaaatgtcctcgcgagatggtccgcctcttcccggttcttactcaatttgccccttttctcgcgccaagcgttgcatccggacgtagacctcttggtaggtgacttcacatcgtcgctgctgttagatgttgacctaggagatacagtgtctaatcttgctcggaagaaccaactgacttttacggaggactgggaacaccggcattggagcggagtagagttgctgcgagaactcaaaaggcaacagcgttacccacacggagcgcccgtggtgttcacttctaatcttgggcgcagtttatattcttctcgggcggagtcccccttgggagagcctgaatggggaatttcgcaaacaccacaggtttggatcgaccatttagcatttgagcaccatggggaagtatggctccaatgggactcgaacgacgccctcttcccacctgctttagtcgagactctgtttgacgcgtactgtcaattgataaaccagctgtgcgacgatgaatccgcatggcaaaagcccttcgcggacatgatgccggcgagtcagcgtgctattcgtgagcgggtgaacgctaccggcgcaccgatcccggagggcctcttacacgaagggatttttcggatcgctcttcaacagcctcaggcgctcgcggtaacggacatgcggtaccaatggaatagttatcgagagatgcgggaacaggtcgtcgctttggcaaatctactccgagagcgcggggtcaagccaggggactcagtcgctgtagcgcttcctcggtcagtcttcctaaccttggctctccacgcgatcgtagaggcgggtgcggcgtggcttcccctcgacacgggctatccggacgatcggttgaagatgatgctagaggatgcacgaccctctctgttaatcacaaccgacgatcaactccccaggttctcagacgtccctaatcttaccagtctatgttacaacgcgcccctcactccacaaggcagcgctcctttacaacttagtcagccgcaccataccgcttatatcatttttacgtccggttccacgggcaggccgaagggtgtaatggtgggccaaactgcaatagtgaatagactattgtggatgcaaaaccactacccgcttaccggggaggacgtagtggctcaaaagactccctgctctttcgatgtcagcgtgtgggagttcttttggccttttatagccggcgctaaattggttatggcggagccggaagctcaccgagaccctttggccatgcaacagttctttgcagagtatggagtcacaacgacgcatttcgtcccatcgatgttagccgcgttcgtagcatcattgacgccacaaactgcgagacagtcatgtgccacacttaagcaagtcttctgctctggtgaggcccttcctgcggacctatgtcgggaatggcaacagcttactggagcccccttgcacaatctttacgggccgactgaggccgcagttgacgtatcgtggtatccagcgttcggggaggagctagcccaagtgcgagggtctagtgttccaattggatacccggtgtggaacacagggttaaggatcctcgacgccatgatgcatccggtaccaccaggtgtcgctggggatttgtacctgactggcattcaactggcacagggttatctagggcggcctgacttaacagctagccgattcatagcagatccattcgctcccggagagcggatgtaccgaacaggcgacgtggcacgctggttagataatggcgctgtcgagtatcttgggcggtcagacgatcagttaaagatacgtggacaacggattgagcttggtgaaatagaccgagttatgcaggcactaccagatgtcgagcaagccgtagcctcttgtgccattgcgcgagaagacattcccgggaacaagcacttggttgcgtacatagtgccgcaagaggagcagacctgcacagagcggtcacgttcaactctcacagtttccttcgtccgttctttcttaaaggagaaactaccagaatatatggtaccgtccgcgatcgtgatattagacgctctgccactcacgccaaatggaaagttggatagaagagctctgcctgctcctgacttgcactcgcaactcctggataaatacgttgctcccagaaacccaatagagactattatcgcggcagcattctcttcattgcttggatgcgacgtccaagatgcggacgcagatttctttgcgctcgggggccatagtctattggccatgaagctcgcagcgcaattgtcgagacaggtagcacggcaagtaacgcccgggcaagtcatggtcgcctcgacagtcgcgaaactcgcgaccattatcgacgctgagctgccagtagaacagccttttgtgcactcaccggaagagcggtatcgaccattcgcgttaacggatgttcagcaagcctacctggtcgggcgccagccgggatttgccctgggcggtgtaggctcgcatttcttcgtggaattcgagatcgcagatctcgacatacaccgcctggaaaaagtgtggaaccgtttaattgcacgtcatgatatgttgcgcgctgtggttcgtgacggtcagcaacgtgtactggaacagaccccgccatgggtcataccagcacatattcttcacagtcctgaagaggcattacaggttcgtgatcgtttagctcaccaagtgttgaaccccgaagtctggccggtatttgatctgcaggtgggcttcgttgacggtatgccggcccgtttatggttgtgccttgataacctgttattggacgggctgagcatgcagattcttctctctgaactggagcatggatatcgctacccacagcaactccctcccccgttgccgatcacttttcgcgattatcttcagcaaccggcactccgtaccccaaatcctgactcattggcttggtggcagacgcaactggatgacatcccacctgcgcccgccctcccgctacgttgtctgcctcaagatgttgaaaccccgcgtttcgcgcgtctgtacggcgcaatggattctgctcgttggcgtcgcctgaaacagcgtgcggccgacgcacatctgactccgtcagctgtcctactgagcgtatggtctacagtgctggcagcttggtcggcgcagccggattttactctcaacctgacattattcgaccggcgaccactgcaccctcagattaatcaaatccttggcgattttacctcactgatgttattgtcgtggcatccgggtgagagttggctgcagtccgcgcgtcttctccagcaacgcctttcagaatcgctcaaccaccgtgatgttagcgccattcgcgtcatgcggcagctggcgagaaggcaaaatgtcccggccgtacccatgccggtcgtatttacctctgcgctggggtttgaacaggataacttcctggcccgtcgcaatctactgaaaccggtgtggggtatcagtcagacgccgcaagtttggctggaccatcaggtctatgaatccgagggcgaactgcgttttaactgggatttcgttgcggccctgtttccggacggtcaagtggaacgtcagttcgcgcaatactgcgccttattgaatcgcatggcagaagatgacagctcttggcagttgccgcttgctgatctggtgcccccgttaaaagtgaccgagcggcgagcgagaaggctgcgtccagaacgcgcccagcctcgtattgcagctgataagagttccgttagtctgatctgtgacacttttcgtgaggtggttggggaacccgtggcaccggctgagaactttttcgaagcgggagccacatccctcaatctggttcagctgcatgtccttctccaacgtcacgaatttgcgaccttaacgctactggatttgttcacccatccaagccctgttgcattggctaactatcttgcgggtgtggccctggaagagaaaacgaagcgcgtgcggccggttcggcgaagacagcgtcgcattcagcacttgcccttagtagctgcgcaacctggaatatggatggccgagaagttatctgaactaccatcagcgtggagcgtagcgcattacgtggagctcactggtgaggttgactcgcctcttttggccagggcggtagtggctggccttgcacaagctgacaccttaagaatgcgtttcacagaggataatggggaagtttggcaatgggtagacgatgcgttaacatttgagttaccggaaatcatagacctgcgcactaacatagaccctcacgggacagctcaggccttgatgcaagcggacctgcaacaggacctacgtgtggattcggggaagcctctggtcttccatcagctaattcaagtagcggacaatcgctggtactggtatcaaaggtaccaccacttgcttgtggacgggttcagttttccagcgataaccaggcaaatagccaacatttattgcacttggttgcgaggagagcctacgcccgcatcccccttcacgccattcgcagacgttgttgaggaataccaacagtatcgcgagagcgaagcgtggcaacgcgatgcggcattctgggcggagcaacgacggcaactaccgcctcccgcatccctatcacctgccccgctccccggccggtccgcgtcagccgacattctacggctaaagctggagttcacagatggtgaatttcgacagcttgctacacaactcagcggggtacaaaggacagacctagcgctcgctctggctgcattatggctaggacgactttgcaatcgaatggactacgcggcgggtttcatatttatgcgccggctcggcagcgcagcgttgaccgcaacgggtccagttttaaatgttcttcctttgggaatccacataggcaacccaagcttctctgagcttctcaccagggttcgcgaggtcgccttaggcgcgtatgcacaccaacatattccttttgagatgttagtagaggcactgcaaccagagcgaaaccttagccatactcctctcttccaagtgatgtttgtccttcagaatgcgcccgcgtcccaattagagttaaccgggatcaccgcaaacccaattaaggttaaatcaactaccacgaagttcgacctaactttaatcatgcaaaacacagctagcggattagtaggtgtttgggagtacaacacggatttattcgacgcgtcaacgattgagcgaatgacagggcactttgtaaccctcctcgagggcgttatcgccaatccacaacagccgatctctcaacttcctattttaactacagtggagcaacagcaacttttagtcgagtggaataacacgcaaaccgactaccccgctgataagtgtatacatcaattattcgaggaacaggtcgagcgcacaccagacgccgttgctgtcgtctttgggaatcagcaactcagctatcgagagatgcgcgaacaagtggttgcactcgccaatttattacgtgagcggggagtcaagccaggagactccgttgccgtggccttaccacgctctgttttcttaacccttgcactacacgcgattgtcgaggcaggtgccgcctggctacctcttgacacaggatatcctgacgatagattaaaaatgatgctcgaggatgcacggccttcccttctgatcacaacagacgatcaattaccccgcttcagtgacgtacctaatctgacctcactctgttacaacgctcccttgacgcctcaagggagcgcccctttacagctgtctcaacctcaccatactgcatatatcatctttacaagtggttctacgggacgccccaagggagtaatggttggtcagactgcgattgtaaatcgtctgttgtggatgcaaaaccactaccctttgacgggggaggacgttgtagcccaaaagactccttgctcgttcgatgtctcagtctgggagttcttttggccatttatagcaggggccaaattagttatggcggagccggaagcccaccgagacccacttgcgatgcagcaattctttgctgagtatggtgtcaccactacacatttcgtcccatcgatgttagcggccttcgtggcttctcttactccacaaacggctaggcaatcttgtgccacactaaagcaagtcttctgctccggcgaggcattacctgcagacttgtgccgggaatggcagcaactcacaggagctccattgcacaatctatacggaccgaccgaggccgcagtagacgtatcttggtatcctgcgtttggcgaggagttagcgcaagtaagaggttcgtcagtaccaataggataccccgtatggaacacggggcttcggatactggacgcgatgatgcatccggtcccaccaggagtcgcgggcgatttatacctgactgggatacagctggcccaaggttacctagggagacctgaccttacggcgtcgaggttcatagcggatccgtttgctccgggtgagcgcatgtaccgtacgggcgacgtcgcgcgatggctagataatggcgccgtagagtatcttggtagatcagacgatcagttaaagatacggggacaacgaatagagcttggggaaatagaccgggtaatgcaggctttgccagatgtcgagcaagcggtggcttcgtgtgctattgcgcgggaggacatacctgggaacaaacaccttgtagcgtacatagttcctcaagaggagcaaacatgcactgagcgatcgaggtccacacttacagtttcgttcgtccggagtttccttaaggagaaactccccgaatatatggtaccgagcgcaatagtgattctagacgctctccccctgactcctaatggaaagctagaccggcgggcgttacccgcccctgacctgcactcacaacttgagacaattattgctgcggctttctcgagcctgctcgggtgcgacgtacaagacgcggatgctgactttttcgcgctaggtggccattcgctgcttgccatgaagctagccgctcagctttcccgacaagtagcgcggcaggtgacaccaggccaagttatggtagcttcgactgtcgcaaagctcgcaacgatcatagacgcggagttagataaatacgtcgctccaaggaacccgataacatccggggaagataaccctatccccctatgtcaaggcgatggggaggagatgagcacatggctacgtcgttttggacccccagtcgaacatcgggccaggctagtgtgtttcccccacgcaggcgcagcggcggattcatacttagacctagcaagagcgttagcaccagagatcgatgttcatgctgttcaataccccggcaggcaagacagaagggacgaggagccattaggaaccgcaggtgaaattgcagatgaagtggcagcggtgctacgtgcgtcgggaggggatgggccttttgcacttttcggccacagtatgggcgccctcatcgcgtacgagacagcaaggcgattagagagggaaccgggagggggacccttacgtttattcgtgagcggacaaacagcgccacgtgtccatgaacgaagaactgatctgcccggtgacgatggactcgtggacgagcttaggcgacttggcacctccgaggcagcgctcgcagacgaagccctgctggctatgtctctcccggtgctcagggcggattatagggtgttaagatcctacgcttgggcggatggtcccccactacgcgccggtataactgccctctgcggtgatgcagacccactaactgcaacaggggatgcggaacgctggttacaacattccgtgattccgggtcggacacggacatttcccggtgggcatttttatttaggggaacaagtgaccgaggtggcaggggctgtccgtagagatttactgagagcagggttagcgggttga

SEQ ID NO: 21 - DNA, 13269 bp, Artificial Sequence
  MHC
atgaacccaccctgcgggccagtccgtgcgaattgcgtacacatatccatagatttccccatgccagtttccaaagtttccggtcctcgatcaaggacaaccagccggaggacacccgtccggattggggccgtggtggtggcaagctcgactagcgaactccttgatgggctcgcagcggttgctgatggtaggccacacgccagcgtagttaggggcgttgcgcgcccttctgcgccggttgtattcgttttcccaggtcaaggagcgcaatgggctgggatggcgggggagctactcggggagagtcgggtctttgcagccgctatggacgcctgcgcgagggcgttcgaacctgtaaccgattggacattggcccaagttttggattcaccagagcaatcccggcgtgtagaggtcgtccaacccgccctttttgcagtgcagacctctttggctgcactctggagatctttcggcgtgacacccgacgcagtcgtagggcactctatcggggagcttgcggcggcgcacgtctgtggggcagccggggcagctgacgcggcaagagctgccgcactgtggtcacgagaaatgatcccactagtggggaacggtgacatggcggcggttgcactctcggcagatgagattgaaccacggatcgcccgttgggacgacgacgtcgtgcttgctggtgttaatggtccccgctcggttttactaaccggcagccctgaaccagtagcaagaagggtacaagaactttcggcagagggagttcgggcacaggtcattaatgtgagcatggcggcccattccgcgcaggtggacgatattgcagaagggatgagatcggctctggcgtggtttgccccaggcgggtccgaagttccattttacgccagcctcactgggggagccgtggacacgcgagaactcgttgcggattactggcgacgctcattcagactgcccgttcgtttcgatgaagctataagatcagccctggaagttgggccaggtacattcgtcgaggcctcaccccacccagtcctggcggctgccctacagcagacactggacgcagaggggtcgtcggcagcggtggtccccacattacagcgggggcaaggcggaatgcgtcggttcctcttggcagcggcacaggcattcactggaggagtggccgtcgattggaccgcggcctatgatgatgtggggcctaacccggccctatgtcgatcgtctcggcgcccaagacggaaaacttcgcgaccgtcaccagcttcgacgggaacaagacatagaacttgctgcgaacggctgctcgccgtcgtgaacggcgaaactgccgcattagccggacgtgaagcagatgcagaggcaacctttcgagagcttgggttagattccgttctggcggcccagctcagagctaaagtatccgcggcgataggtcgagaagtcaatattgcactactctatgaccacccaaccccgagagcactcgcagaggcacttgctggcctaccccaggaaattaaacacacgccggcggttcggaccacatccgaagatccaattgccatagtatccatggcttgccggttacccggtggtgtgaataccccacagagactatgggaattattacgtgaagggggagaaaccctcagtggcttccctaccgaccgagggtgggacctcgcgaggttgcatcacccagacccagacaaccccggtacgtcatacgttgataaagggggattcctggacgatgcggcagggtttgacgcagaatttttcggtgtgagccccagagaagcagcggctatggacccgcagcagagattactcctcgaaaccagctgggagttagtcgagaatgcagggattgatccacatagcctaagggggaccgccactggtgtcttcctcggcgttgccaagtttgggtatggcgaggatacggcagctgccgaagacgtcgaggggtactctgtcactggtgtagccccggcagtggcgtcgggcagaattagttacacgatggggttggaagggccgtctatttcggttgataccgcctgttcctccagtctggttgcactccaccttgcagtcgagtcgctccggaaaggagaaagcagtatggccgtggtcgggggagcggcggtgatggccacaccgggtgtgtttgtggatttttcccgacagagagccttggccgcggatgggcgttcaaaggcgttcggagcaggtgcagacgggtttggatttagcgaaggtgtgacactggttctcctagaaagattaagtgaagcccggcgtaacggccatgaggtgctggcagttgttagaggttccgcattaaaccaggacggggcttcgaacgggctgagcgccccctcgggcccggcacagagaagagtgatacgccaagcactcgaatcgtgtggcctagaaccaggtgacgttgacgcggtggaagcgcacgggacaggaactgcgttaggggacccgatagaagcaaacgccttgctggacacttatggtagagatcgtgatgcggatcgacccctctggttaggaagtgttaagtcaaatataggacacactcaggcagcggcgggagtaactgggctgctcaaagtagtcctagccttacgcaatggggaactacccgccaccctacatgtcgaggaaccgacaccgcatgtggattggtcgagcgggggagttgctctcttggcgggtaatcagccgtggcgaagaggtgaacgaacccgtagagccgccgtgtccgcattcgggatcagtggtacgaacgcgcacgtgattgtggaagaagctccacaagaggtgagaccagcgcccggtcaaggactctcgcccgcggtgtcaaccttggtagtggcgggtaaaactatgcagcgtgtttcggcaaccgccggtatgctcgcagattggatggaaggcccaggtgcagatgtggcgctggcggacgtggcgcacacgttaaatcatcaccgttcacggcaaccaaagttcggtacggtggtggccagggaccggacacaggcaatcgccggactaagagcgctggcggcgggtcagcacgccccaggggttgttaaccctgctgaaggaagtccaggtccagggacggtgttcgtgtttcctggccaggggtcccagcgtgcaggcatgggggaggagttggctgcggctttccccgtgtttgccagaatccaccagcaagtgtgggatttactcgatgttcctgatctcgacgttaacgaaacggggtacgcacaaccagcactcttcgcactccaagtggcgctgtttgggctcctcgaatcatggggagtacggccggatgccgtggtcgggcatagtgtaggggaattagcggcagggtacgtttccgggctttggagtcttgaggatgcttgcacgctcgtgtcggcgagagcccgtctaatgcaagccttaccggcaggtggtgttatggcggcagttccagtgtccgaagacgaagcacgggctgtgttgggggaaggagtcgaaatagctgcggtcaacggtccgtcgagcgtggttctaagcggtgatgaagcagcagtgctccaggccgcggaagggttaggcaagtggacgcgattaccgacctcgcatgcattccattctgctcgtatggaaccaatgctggaagagtttagagcagtggcggaaggtctaacatacaggactccccaggtggcaatggccgccggagaccaggttatgaccgctgaatactgggtgcgtcaggttagggatacagttcgttttggcgagcaagttgcctcgttcgaggatgctgtattcgtggaattgggagcagatcgctctcttgcacggctagtcgatggtatcgcgatgttgcacggggatcatgaggcacaggctggtatgcggagagaacaacccttgcccttaggtttacgaagattgctaaccgacctgcataacgctggtgctgccgtcgattttagtgttttgtgcccacaaggtcgtctggttgacgcaccgttaccagcctggtcacaccggtttctcttctatgaccgggaaggagtggacaatagatcaccagggggaagcacagtggcggtccacccgcttttactagccgcggtggatgtgccgggccacggtggagcggttttcacgggtagactctcgactgacgagcaaccgtggttagcggagcacgttgtcgggggaagaaccctagttcctggttctgttttagtcgatctagccttagcggcaggcgaagacgtagggctaccggtgttagaagaattagtattgcagaggccgctggtgcttgccggcgcgggagcactcctacggatgtcggtcggggcaccagacgagagcggtagaagaactatcgatgttcacgcagctgaagacgtcgccgatttagcagatgcccaatggtcccagcacgccaccgggactttagcccaaggggtagcggcggggcccagggacacagagcaatggcccccagaggatgccgtccggattccattagacgaccattatgatggtctcgcggaacagggttatgagtacggtccgtcgtttcaggcgctagtggcctacgtggcggaggatgcgactgcgacaatgttagcggaagtcgcgcttccgggcagcattagatcgcaacaaggtctatacgccatccatcccgcactgctggacgcttgttttcaatctgtcggagcccacccagacagtcaatccgtcgggtcaggtctactcgtacccctcggtgttcggagagttcgtgcgtacgcacccgtaaggaccgcccgttattgttacacccgcgtcacgaaagttgaactagctggggttgaggccgacatcgacgttctggatgctcacggcacagtgcttctagccgtgtgcggtcttcgtatcgggaccggagtgagcgagagggacaaacacaacagagttctcaatgagcgcctactcaccatcgaatggcatcagcgtgaactaccagaaatggacccctcgggtgccgggaagtggctcctaatctcggactgtgcagcatccgatgtcaccgctacacgactggctgatgccttccgggagcacagcgctgcgtgcactaccatgcggtggccacttcacgatgatcaactagcagccgccgaccaactccgggaccaggtgggttcagatgagttttctggcgtggtagtactaacagggccaaacacagggacccctcatcagggttccgcagaccgtggcgccgagtacgttaggcggttagttggaatcgctcgtgaacttagcgatcttcccggagcggttccccgtatgtatgtcgtcacaaggggagcgcagagagtccttgccgatgattgtgttaatttagaacagggagggctcagaggtctgctgaggaccatcggtgctgagcacccacatctccgcgccacccaaattgatgttgatgagcagacaggagtagagcagctggcgcgacaactcctagctacatcggaggaagacgagacagcctggagggacaacgaatggtacgttgcgaggttatgccccacacccctgaggccacaggaacgtaggacaatagtggcggaccatcaacagtctggtatgcggttacaaatacgtacgcccggtgcaatcgatagtgtggcctttgaacccgcacccgatgtagagcaacccttacgggcgggtgaagttcgggttgacgttagagcaaccggtgttaatttccgtgacgttctactcgctctcgggatgtatccccagaaagctgacatggggacagaagcagctggtgttgtaacagcagtgggacctgatgtcgatgcgtttgcgcctggtgatagagttctagggctattccaaggggcatttgctccaattgcggtgactgaccatcgtttactggcacgggtgccagacgggtggtcagatgccgatgcggcggcggtgccaatagcttacacgacagcacattatgcgctgcacgacctggcggggttgcgggcggggcaatctgtcctgatacacgcggcagcgggtggtgttggtatggccgctgttgcactggcacggagggccggcgcagaagttctggctaccgcaggacctgcaaaacacggtacgctacgggcattagggctagatgatgaacacatcgcttcgagtcgggagaccgggttcgcgcgtaagttccgagagcggactgggggacgaggagtggacgtcgttctaaacagcttgaccggcgaactattagacgagtccgcggatctcctcgcggaggacggagtcttcgtggaaatgggaaagactgatctgcgcgatgcaggggactttcgtgggcgctacgccccgtttgatctaggggaagcaggcgatgacaggctcggggaaattctacgtgaggtggtgggactgctcggtgcaggggaactcgaccgactccctgttagcgcgtgggaattggggataccccagacggggaagtcgttagtgacgctgccacccgaacaagcgcaagttttcagaccagacggcactgtattgatcaccgggggaacgggaacgttaggtcggctgctggcccgtcatctggttacagagcacggggtgcgtcacctgctgctagtgtcgaggagaggagcagatgcccctggatcggacgagctgagggccgaaatcgaggatctcggagcatcagcggaaattgcagcatgtgatacagccgatcgagacgctctcagcgcgttgctagatggactgccgaggccactgaccggagtagttcacgccgcgggagtcctcgctgacggtctggttacatccatcgacgagcccgcagtcgaacaagttctccgtgcaaaagttgatgcggcctggaacctgcacgagctaactgcgaacaccggtctcagctttttcgtgctgttctcgtcagccgcaagtgtgttagcggggccggggcagggagtatatgcggcagcgaacgaatctttaaacgctctggccgctctgcgtaggactaggggtttacccgcaaaagcattgggatggggattatgggcgatagggcgtgcaatagcatttgccgagcagaccggtgacgcaatcgccccggaggaaggcgcgtacgccttcgagacactactcagacataacagggcgtactcgggttacgctcccgtgatagggtcaccatggctgactgcgttcgcccaacattcgccctttgcggagaagttccagtccctggggcaaaatagatccgggacgtctaagtttctggcagaattagtcgatctgccaagagaagaatggccagatcggttacgtcgtctattagaactggtgaggtctcatgctgccgcagtttcggggtatggatcggcagaccaattaccagaaagaaaagcattcaaagacctcggattcgattcactggcagcagtcgaactaagaaatcgtctagggaccgcgacaggcgtccggctgcccagtactctggtgttcgaccacccaaccccacttgcggttgcggaacatctacgtgatcgtctactgccagtagaacagccttttgtgcactcaccggaagagcggtatcgaccattcgcgttaacggatgttcagcaagcctacctggtcgggcgccagccgggatttgccctgggcggtgtaggctcgcatttcttcgtggaattcgagatcgcagatctcgacatacaccgcctggaaaaagtgtggaaccgtttaattgcacgtcatgatatgttgcgcgctgtggttcgtgacggtcagcaacgtgtactggaacagaccccgccatgggtcataccagcacatattcttcacagtcctgaagaggcattacaggttcgtgatcgtttagctcaccaagtgttgaaccccgaagtctggccggtatttgatctgcaggtgggcttcgttgacggtatgccggcccgtttatggttgtgccttgataacctgttattggacgggctgagcatgcagattcttctctctgaactggagcatggatatcgctacccacagcaactccctcccccgttgccgatcacttttcgcgattatcttcagcaaccggcactccgtaccccaaatcctgactcattggcttggtggcagacgcaactggatgacatcccacctgcgcccgccctcccgctacgttgtctgcctcaagatgttgaaaccccgcgtttcgcgcgtctgtacggcgcaatggattctgctcgttggcgtcgcctgaaacagcgtgcggccgacgcacatctgactccgtcagctgtcctactgagcgtatggtctacagtgctggcagcttggtcggcgcagccggattttactctcaacctgacattattcgaccggcgaccactgcaccctcagattaatcaaatccttggcgattttacctcactgatgttattgtcgtggcatccgggtgagagttggctgcagtccgcgcgtcttctccagcaacgcctttcagaatcgctcaaccaccgtgatgttagcgccattcgcgtcatgcggcagctggcgagaaggcaaaatgtcccggccgtacccatgccggtcgtatttacctctgcgctggggtttgaacaggataacttcctggcccgtcgcaatctactgaaaccggtgtggggtatcagtcagacgccgcaagtttggctggaccatcaggtctatgaatccgagggcgaactgcgttttaactgggatttcgttgcggccctgtttccggacggtcaagtggaacgtcagttcgcgcaatactgcgccttattgaatcgcatggcagaagatgacagctcttggcagttgccgcttgctgatctggtgcccccgttaaaagtgaccgagcggcgagcgagaaggctgcgtccagaacgcgcccagcctcgtattgcagctgataagagttccgttagtctgatctgtgacacttttcgtgaggtggttggggaacccgtggcaccggctgagaactttttcgaagcgggagccacatccctcaatctggttcagctgcatgtccttctccaacgtcacgaatttgcgaccttaacgctactggatttgttcacccatccaagccctgttgcattggctaactatcttgcgggtgtggccctggaagagaaaacgaagcgcgtgcggccggttcggcgaagacagcgtcgcattggagagccgttcccactcgctcctatgcaacacgccatgtgggtagggcggcacgaccaccaacagctcgggggagtagcaggccatctttacgtcgagtttgacggcgcgagagtcgaccccgatcggttgcgcgctgccgccacccgactcgccctacgtcaccctatgttgagggtacagttcctgcctgacggtacacaaaggatccctccagccgcaggctcgcgggactttcccatcagcgttgcggatcttcgtcacgtagctcctgacgttgtcgatcaacggctcgcgggtattagagacgcaaagtctcatcaacagcttgatggagctgtcttcgagttggctctcactctcctgccaggtgaaaggacgaggctgcacgtcgacctggatatgcaagctgctgacgccatgagctacaggatcctgctggcggacttggccgcactatacgacgggagagagcccccagcactcggttacacgtatagagagtaccgccaggctattgaggccgaggaaacattaccgcaacctgttcgcgacgccgatagggactggtgggcacaaagaataccacagcttccagacccgcccgcactaccgacgcgtgccggtggtgagagagatcgccggcgctcgaccagaagatggcactggttagacccacaaacaagggacgccctcttcgcacgagcacgagctcgtggcatcacacctgcaatgacacttgcggccgcgtttgcaaatgtcctcgcgagatggtccgcctcttcccggttcttactcaatttgccccttttctcgcgccaagcgttgcatccggacgtagacctcttggtaggtgacttcacatcgtcgctgctgttagatgttgacctaggagatacagtgtctaatcttgctcggaagaaccaactgacttttacggaggactgggaacaccggcattggagcggagtagagttgctgcgagaactcaaaaggcaacagcgttacccacacggagcgcccgtggtgttcacttctaatcttgggcgcagtttatattcttctcgggcggagtcccccttgggagagcctgaatggggaatttcgcaaacaccacaggtttggatcgaccatttagcatttgagcaccatggggaagtatggctccaatgggactcgaacgacgccctcttcccacctgctttagtcgagactctgtttgacgcgtactgtcaattgataaaccagctgtgcgacgatgaatccgcatggcaaaagcccttcgcggacatgatgccggcgagtcagcgtgctattcgtgagcgggtgaacgctaccggcgcaccgatcccggagggcctcttacacgaagggatttttcggatcgctcttcaacagcctcaggcgctcgcggtaacggacatgcggtaccaatggaatagttatcgagagatgcgggaacaggtcgtcgctttggcaaatctactccgagagcgcggggtcaagccaggggactcagtcgctgtagcgcttcctcggtcagtcttcctaaccttggctctccacgcgatcgtagaggcgggtgcggcgtggcttcccctcgacacgggctatccggacgatcggttgaagatgatgctagaggatgcacgaccctctctgttaatcacaaccgacgatcaactccccaggttctcagacgtccctaatcttaccagtctatgttacaacgcgcccctcactccacaaggcagcgctcctttacaacttagtcagccgcaccataccgcttatatcatttttacgtccggttccacgggcaggccgaagggtgtaatggtgggccaaactgcaatagtgaatagactattgtggatgcaaaaccactacccgcttaccggggaggacgtagtggctcaaaagactccctgctctttcgatgtcagcgtgtgggagttcttttggccttttatagccggcgctaaattggttatggcggagccggaagctcaccgagaccctttggccatgcaacagttctttgcagagtatggagtcacaacgacgcatttcgtcccatcgatgttagccgcgttcgtagcatcattgacgccacaaactgcgagacagtcatgtgccacacttaagcaagtcttctgctctggtgaggcccttcctgcggacctatgtcgggaatggcaacagcttactggagcccccttgcacaatctttacgggccgactgaggccgcagttgacgtatcgtggtatccagcgttcggggaggagctagcccaagtgcgagggtctagtgttccaattggatacccggtgtggaacacagggttaaggatcctcgacgccatgatgcatccggtaccaccaggtgtcgctggggatttgtacctgactggcattcaactggcacagggttatctagggcggcctgacttaacagctagccgattcatagcagatccattcgctcccggagagcggatgtaccgaacaggcgacgtggcacgctggttagataatggcgctgtcgagtatcttgggcggtcagacgatcagttaaagatacgtggacaacggattgagcttggtgaaatagaccgagttatgcaggcactaccagatgtcgagcaagccgtagcctcttgtgccattgcgcgagaagacattcccgggaacaagcacttggttgcgtacatagtgccgcaagaggagcagacctgcacagagcggtcacgttcaactctcacagtttccttcgtccgttctttcttaaaggagaaactaccagaatatatggtaccgtccgcgatcgtgatattagacgctctgccactcacgccaaatggaaagttggatagaagagctctgcctgctcctgacttgcactcgcaactcctggataaatacgttgctcccagaaacccaatagagactattatcgcggcagcattctcttcattgcttggatgcgacgtccaagatgcggacgcagatttctttgcgctcgggggccatagtctattggccatgaagctcgcagcgcaattgtcgagacaggtagcacggcaagtaacgcccgggcaagtcatggtcgcctcgacagtcgcgaaactcgcgaccattatcgacgctgagacatccggggaagataaccctatccccctatgtcaaggcgatggggaggagatgagcacatggctacgtcgttttggacccccagtcgaacatcgggccaggctagtgtgtttcccccacgcaggcgcagcggcggattcatacttagacctagcaagagcgttagcaccagagatcgatgttcatgctgttcaataccccggcaggcaagacagaagggacgaggagccattaggaaccgcaggtgaaattgcagatgaagtggcagcggtgctacgtgcgtcgggaggggatgggccttttgcacttttcggccacagtatgggcgccctcatcgcgtacgagacagcaaggcgattagagagggaaccgggagggggacccttacgtttattcgtgagcggacaaacagcgccacgtgtccatgaacgaagaactgatctgcccggtgacgatggactcgtggacgagcttaggcgacttggcacctccgaggcagcgctcgcagacgaagccctgctggctatgtctctcccggtgctcagggcggattatagggtgttaagatcctacgcttgggcggatggtcccccactacgcgccggtataactgccctctgcggtgatgcagacccactaactgcaacaggggatgcggaacgctggttacaacattccgtgattccgggtcggacacggacatttcccggtgggcatttttatttaggggaacaagtgaccgaggtggcaggggctgtccgtagagatttactgagagcagggttagcgggttga

SEQ ID NO: 22 - DNA, 14592 bp, Artificial Sequence
  MHH
atgaacccaccctgcgggccagtccgtgcgaattgcgtacacatatccatagatttccccatgccagtttccaaagtttccggtcctcgatcaaggacaaccagccggaggacacccgtccggattggggccgtggtggtggcaagctcgactagcgaactccttgatgggctcgcagcggttgctgatggtaggccacacgccagcgtagttaggggcgttgcgcgcccttctgcgccggttgtattcgttttcccaggtcaaggagcgcaatgggctgggatggcgggggagctactcggggagagtcgggtctttgcagccgctatggacgcctgcgcgagggcgttcgaacctgtaaccgattggacattggcccaagttttggattcaccagagcaatcccggcgtgtagaggtcgtccaacccgccctttttgcagtgcagacctctttggctgcactctggagatctttcggcgtgacacccgacgcagtcgtagggcactctatcggggagcttgcggcggcgcacgtctgtggggcagccggggcagctgacgcggcaagagctgccgcactgtggtcacgagaaatgatcccactagtggggaacggtgacatggcggcggttgcactctcggcagatgagattgaaccacggatcgcccgttgggacgacgacgtcgtgcttgctggtgttaatggtccccgctcggttttactaaccggcagccctgaaccagtagcaagaagggtacaagaactttcggcagagggagttcgggcacaggtcattaatgtgagcatggcggcccattccgcgcaggtggacgatattgcagaagggatgagatcggctctggcgtggtttgccccaggcgggtccgaagttccattttacgccagcctcactgggggagccgtggacacgcgagaactcgttgcggattactggcgacgctcattcagactgcccgttcgtttcgatgaagctataagatcagccctggaagttgggccaggtacattcgtcgaggcctcaccccacccagtcctggcggctgccctacagcagacactggacgcagaggggtcgtcggcagcggtggtccccacattacagcgggggcaaggcggaatgcgtcggttcctcttggcagcggcacaggcattcactggaggagtggccgtcgattggaccgcggcctatgatgatgtggggcctaacccggccctatgtcgatcgtctcggcgcccaagacggaaaacttcgcgaccgtcaccagcttcgacgggaacaagacatagaacttgctgcgaacggctgctcgccgtcgtgaacggcgaaactgccgcattagccggacgtgaagcagatgcagaggcaacctttcgagagcttgggttagattccgttctggcggcccagctcagagctaaagtatccgcggcgataggtcgagaagtcaatattgcactactctatgaccacccaaccccgagagcactcgcagaggcacttgctggcctaccccaggaaattaaacacacgccggcggttcggaccacatccgaagatccaattgccatagtatccatggcttgccggttacccggtggtgtgaataccccacagagactatgggaattattacgtgaagggggagaaaccctcagtggcttccctaccgaccgagggtgggacctcgcgaggttgcatcacccagacccagacaaccccggtacgtcatacgttgataaagggggattcctggacgatgcggcagggtttgacgcagaatttttcggtgtgagccccagagaagcagcggctatggacccgcagcagagattactcctcgaaaccagctgggagttagtcgagaatgcagggattgatccacatagcctaagggggaccgccactggtgtcttcctcggcgttgccaagtttgggtatggcgaggatacggcagctgccgaagacgtcgaggggtactctgtcactggtgtagccccggcagtggcgtcgggcagaattagttacacgatggggttggaagggccgtctatttcggttgataccgcctgttcctccagtctggttgcactccaccttgcagtcgagtcgctccggaaaggagaaagcagtatggccgtggtcgggggagcggcggtgatggccacaccgggtgtgtttgtggatttttcccgacagagagccttggccgcggatgggcgttcaaaggcgttcggagcaggtgcagacgggtttggatttagcgaaggtgtgacactggttctcctagaaagattaagtgaagcccggcgtaacggccatgaggtgctggcagttgttagaggttccgcattaaaccaggacggggcttcgaacgggctgagcgccccctcgggcccggcacagagaagagtgatacgccaagcactcgaatcgtgtggcctagaaccaggtgacgttgacgcggtggaagcgcacgggacaggaactgcgttaggggacccgatagaagcaaacgccttgctggacacttatggtagagatcgtgatgcggatcgacccctctggttaggaagtgttaagtcaaatataggacacactcaggcagcggcgggagtaactgggctgctcaaagtagtcctagccttacgcaatggggaactacccgccaccctacatgtcgaggaaccgacaccgcatgtggattggtcgagcgggggagttgctctcttggcgggtaatcagccgtggcgaagaggtgaacgaacccgtagagccgccgtgtccgcattcgggatcagtggtacgaacgcgcacgtgattgtggaagaagctccacaagaggtgagaccagcgcccggtcaaggactctcgcccgcggtgtcaaccttggtagtggcgggtaaaactatgcagcgtgtttcggcaaccgccggtatgctcgcagattggatggaaggcccaggtgcagatgtggcgctggcggacgtggcgcacacgttaaatcatcaccgttcacggcaaccaaagttcggtacggtggtggccagggaccggacacaggcaatcgccggactaagagcgctggcggcgggtcagcacgccccaggggttgttaaccctgctgaaggaagtccaggtccagggacggtgttcgtgtttcctggccaggggtcccagcgtgcaggcatgggggaggagttggctgcggctttccccgtgtttgccagaatccaccagcaagtgtgggatttactcgatgttcctgatctcgacgttaacgaaacggggtacgcacaaccagcactcttcgcactccaagtggcgctgtttgggctcctcgaatcatggggagtacggccggatgccgtggtcgggcatagtgtaggggaattagcggcagggtacgtttccgggctttggagtcttgaggatgcttgcacgctcgtgtcggcgagagcccgtctaatgcaagccttaccggcaggtggtgttatggcggcagttccagtgtccgaagacgaagcacgggctgtgttgggggaaggagtcgaaatagctgcggtcaacggtccgtcgagcgtggttctaagcggtgatgaagcagcagtgctccaggccgcggaagggttaggcaagtggacgcgattaccgacctcgcatgcattccattctgctcgtatggaaccaatgctggaagagtttagagcagtggcggaaggtctaacatacaggactccccaggtggcaatggccgccggagaccaggttatgaccgctgaatactgggtgcgtcaggttagggatacagttcgttttggcgagcaagttgcctcgttcgaggatgctgtattcgtggaattgggagcagatcgctctcttgcacggctagtcgatggtatcgcgatgttgcacggggatcatgaggcacaggctggtatgcggagagaacaacccttgcccttaggtttacgaagattgctaaccgacctgcataacgctggtgctgccgtcgattttagtgttttgtgcccacaaggtcgtctggttgacgcaccgttaccagcctggtcacaccggtttctcttctatgaccgggaaggagtggacaatagatcaccagggggaagcacagtggcggtccacccgcttttactagccgcggtggatgtgccgggccacggtggagcggttttcacgggtagactctcgactgacgagcaaccgtggttagcggagcacgttgtcgggggaagaaccctagttcctggttctgttttagtcgatctagccttagcggcaggcgaagacgtagggctaccggtgttagaagaattagtattgcagaggccgctggtgcttgccggcgcgggagcactcctacggatgtcggtcggggcaccagacgagagcggtagaagaactatcgatgttcacgcagctgaagacgtcgccgatttagcagatgcccaatggtcccagcacgccaccgggactttagcccaaggggtagcggcggggcccagggacacagagcaatggcccccagaggatgccgtccggattccattagacgaccattatgatggtctcgcggaacagggttatgagtacggtccgtcgtttcaggcgctagtggcctacgtggcggaggatgcgactgcgacaatgttagcggaagtcgcgcttccgggcagcattagatcgcaacaaggtctatacgccatccatcccgcactgctggacgcttgttttcaatctgtcggagcccacccagacagtcaatccgtcgggtcaggtctactcgtacccctcggtgttcggagagttcgtgcgtacgcacccgtaaggaccgcccgttattgttacacccgcgtcacgaaagttgaactagctggggttgaggccgacatcgacgttctggatgctcacggcacagtgcttctagccgtgtgcggtcttcgtatcgggaccggagtgagcgagagggacaaacacaacagagttctcaatgagcgcctactcaccatcgaatggcatcagcgtgaactaccagaaatggacccctcgggtgccgggaagtggctcctaatctcggactgtgcagcatccgatgtcaccgctacacgactggctgatgccttccgggagcacagcgctgcgtgcactaccatgcggtggccacttcacgatgatcaactagcagccgccgaccaactccgggaccaggtgggttcagatgagttttctggcgtggtagtactaacagggccaaacacagggacccctcatcagggttccgcagaccgtggcgccgagtacgttaggcggttagttggaatcgctcgtgaacttagcgatcttcccggagcggttccccgtatgtatgtcgtcacaaggggagcgcagagagtccttgccgatgattgtgttaatttagaacagggagggctcagaggtctgctgaggaccatcggtgctgagcacccacatctccgcgccacccaaattgatgttgatgagcagacaggagtagagcagctggcgcgacaactcctagctacatcggaggaagacgagacagcctggagggacaacgaatggtacgttgcgaggttatgccccacacccctgaggccacaggaacgtaggacaatagtggcggaccatcaacagtctggtatgcggttacaaatacgtacgcccggtgcaatcgatagtgtggcctttgaacccgcacccgatgtagagcaacccttacgggcgggtgaagttcgggttgacgttagagcaaccggtgttaatttccgtgacgttctactcgctctcgggatgtatccccagaaagctgacatggggacagaagcagctggtgttgtaacagcagtgggacctgatgtcgatgcgtttgcgcctggtgatagagttctagggctattccaaggggcatttgctccaattgcggtgactgaccatcgtttactggcacgggtgccagacgggtggtcagatgccgatgcggcggcggtgccaatagcttacacgacagcacattatgcgctgcacgacctggcggggttgcgggcggggcaatctgtcctgatacacgcggcagcgggtggtgttggtatggccgctgttgcactggcacggagggccggcgcagaagttctggctaccgcaggacctgcaaaacacggtacgctacgggcattagggctagatgatgaacacatcgcttcgagtcgggagaccgggttcgcgcgtaagttccgagagcggactgggggacgaggagtggacgtcgttctaaacagcttgaccggcgaactattagacgagtccgcggatctcctcgcggaggacggagtcttcgtggaaatgggaaagactgatctgcgcgatgcaggggactttcgtgggcgctacgccccgtttgatctaggggaagcaggcgatgacaggctcggggaaattctacgtgaggtggtgggactgctcggtgcaggggaactcgaccgactccctgttagcgcgtgggaattggggataccccagacggggaagtcgttagtgacgctgccacccgaacaagcgcaagttttcagaccagacggcactgtattgatcaccgggggaacgggaacgttaggtcggctgctggcccgtcatctggttacagagcacggggtgcgtcacctgctgctagtgtcgaggagaggagcagatgcccctggatcggacgagctgagggccgaaatcgaggatctcggagcatcagcggaaattgcagcatgtgatacagccgatcgagacgctctcagcgcgttgctagatggactgccgaggccactgaccggagtagttcacgccgcgggagtcctcgctgacggtctggttacatccatcgacgagcccgcagtcgaacaagttctccgtgcaaaagttgatgcggcctggaacctgcacgagctaactgcgaacaccggtctcagctttttcgtgctgttctcgtcagccgcaagtgtgttagcggggccggggcagggagtatatgcggcagcgaacgaatctttaaacgctctggccgctctgcgtaggactaggggtttacccgcaaaagcattgggatggggattatgggcgatagggcgtgcaatagcatttgccgagcagaccggtgacgcaatcgccccggaggaaggcgcgtacgccttcgagacactactcagacataacagggcgtactcgggttacgctcccgtgatagggtcaccatggctgactgcgttcgcccaacattcgccctttgcggagaagttccagtccctggggcaaaatagatccgggacgtctaagtttctggcagaattagtcgatctgccaagagaagaatggccagatcggttacgtcgtctattagaactggtgaggtctcatgctgccgcagtttcggggtatggatcggcagaccaattaccagaaagaaaagcattcaaagacctcggattcgattcactggcagcagtcgaactaagaaatcgtctagggaccgcgacaggcgtccggctgcccagtactctggtgttcgaccacccaaccccacttgcggttgcggaacatctacgtgatcgtctacctggaattggggcgctagttcccgctcccgtggtaatcgcagcaggccgtacggaggaaccaattgccatagtatccatggcttgccggttacccggtggtgtgaataccccacagagactatgggaattattacgtgaagggggagaaaccctcagtggcttccctaccgaccgagggtgggacctcgcgaggttgcatcacccagacccagacaaccccggtacgtcatacgttgataaagggggattcctggacgatgcggcagggtttgacgcagaatttttcggtgtgagccccagagaagcagcggctatggacccgcagcagagattactcctcgaaaccagctgggagttagtcgagaatgcagggattgatccacatagcctaagggggaccgccactggtgtcttcctcggcgttgccaagtttgggtatggcgaggatacggcagctgccgaagacgtcgaggggtactctgtcactggtgtagccccggcagtggcgtcgggcagaattagttacacgatggggttggaagggccgtctatttcggttgataccgcctgttcctccagtctggttgcactccaccttgcagtcgagtcgctccggaaaggagaaagcagtatggccgtggtcgggggagcggcggtgatggccacaccgggtgtgtttgtggatttttcccgacagagagccttggccgcggatgggcgttcaaaggcgttcggagcaggtgcagacgggtttggatttagcgaaggtgtgacactggttctcctagaaagattaagtgaagcccggcgtaacggccatgaggtgctggcagttgttagaggttccgcattaaaccaggacggggcttcgaacgggctgagcgccccctcgggcccggcacagagaagagtgatacgccaagcactcgaatcgtgtggcctagaaccaggtgacgttgacgcggtggaagcgcacgggacaggaactgcgttaggggacccgatagaagcaaacgccttgctggacacttatggtagagatcgtgatgcggatcgacccctctggttaggaagtgttaagtcaaatataggacacactcaggcagcggcgggagtaactgggctgctcaaagtagtcctagccttacgcaatggggaactacccgccaccctacatgtcgaggaaccgacaccgcatgtggattggtcgagcgggggagttgctctcttggcgggtaatcagccgtggcgaagaggtgaacgaacccgtagagccgccgtgtccgcattcgggatcagtggtacgaacgcgcacgtgattgtggaagaagctccacaagaggtgagaccagcgcccggtcaaggactctcgcccgcggtgtcaaccttggtagtggcgggtaaaactatgcagcgtgtttcggcaaccgccggtatgctcgcagattggatggaaggcccaggtgcagatgtggcgctggcggacgtggcgcacacgttaaatcatcaccgttcacggcaaccaaagttcggtacggtggtggccagggaccggacacaggcaatcgccggactaagagcgctggcggcgggtcagcacgccccaggggttgttaaccctgctgaaggaagtccaggtccagggacggtgttcgtgtttcctggccaggggtcccagcgtgcaggcatgggggaggagttggctgcggctttccccgtgtttgccagaatccaccagcaagtgtgggatttactcgatgttcctgatctcgacgttaacgaaacggggtacgcacaaccagcactcttcgcactccaagtggcgctgtttgggctcctcgaatcatggggagtacggccggatgccgtggtcgggcatagtgtaggggaattagcggcagggtacgtttccgggctttggagtcttgaggatgcttgcacgctcgtgtcggcgagagcccgtctaatgcaagccttaccggcaggtggtgttatggcggcagttccagtgtccgaagacgaagcacgggctgtgttgggggaaggagtcgaaatagctgcggtcaacggtccgtcgagcgtggttctaagcggtgatgaagcagcagtgctccaggccgcggaagggttaggcaagtggacgcgattaccgacctcgcatgcattccattctgctcgtatggaaccaatgctggaagagtttagagcagtggcggaaggtctaacatacaggactccccaggtggcaatggccgccggagaccaggttatgaccgctgaatactgggtgcgtcaggttagggatacagttcgttttggcgagcaagttgcctcgttcgaggatgctgtattcgtggaattgggagcagatcgctctcttgcacggctagtcgatggtatcgcgatgttgcacggggatcatgaggcacaggctggtatgcggagagaacaacccttgcccttaggtttacgaagattgctaaccgacctgcataacgctggtgctgccgtcgattttagtgttttgtgcccacaaggtcgtctggttgacgcaccgttaccagcctggtcacaccggtttctcttctatgaccgggaaggagtggacaatagatcaccagggggaagcacagtggcggtccacccgcttttactagccgcggtggatgtgccgggccacggtggagcggttttcacgggtagactctcgactgacgagcaaccgtggttagcggagcacgttgtcgggggaagaaccctagttcctggttctgttttagtcgatctagccttagcggcaggcgaagacgtagggctaccggtgttagaagaattagtattgcagaggccgctggtgcttgccggcgcgggagcactcctacggatgtcggtcggggcaccagacgagagcggtagaagaactatcgatgttcacgcagctgaagacgtcgccgatttagcagatgcccaatggtcccagcacgccaccgggactttagcccaaggggtagcggcggggcccagggacacagagcaatggcccccagaggatgccgtccggattccattagacgaccattatgatggtctcgcggaacagggttatgagtacggtccgtcgtttcaggcgctagtggcctacgtggcggaggatgcgactgcgacaatgttagcggaagtcgcgcttccgggcagcattagatcgcaacaaggtctatacgccatccatcccgcactgctggacgcttgttttcaatctgtcggagcccacccagacagtcaatccgtcgggtcaggtctactcgtacccctcggtgttcggagagttcgtgcgtacgcacccgtaaggaccgcccgttattgttacacccgcgtcacgaaagttgaactagctggggttgaggccgacatcgacgttctggatgctcacggcacagtgcttctagccgtgtgcggtcttcgtatcgggaccggagtgagcgagagggacaaacacaacagagttctcaatgagcgcctactcaccatcgaatggcatcagcgtgaactaccagaaatggacccctcgggtgccgggaagtggctcctaatctcggactgtgcagcatccgatgtcaccgctacacgactggctgatgccttccgggagcacagcgctgcgtgcactaccatgcggtggccacttcacgatgatcaactagcagccgccgaccaactccgggaccaggtgggttcagatgagttttctggcgtggtagtactaacagggccaaacacagggacccctcatcagggttccgcagaccgtggcgccgagtacgttaggcggttagttggaatcgctcgtgaacttagcgatcttcccggagcggttccccgtatgtatgtcgtcacaaggggagcgcagagagtccttgccgatgattgtgttaatttagaacagggagggctcagaggtctgctgaggaccatcggtgctgagcacccacatctccgcgccacccaaattgatgttgatgagcagacaggagtagagcagctggcgcgacaactcctagctacatcggaggaagacgagacagcctggagggacaacgaatggtacgttgcgaggttatgccccacacccctgaggccacaggaacgtaggacaatagtggcggaccatcaacagtctggtatgcggttacaaatacgtacgcccggtgcaatcgatagtgtggcctttgaacccgcacccgatgtagagcaacccttacgggcgggtgaagttcgggttgacgttagagcaaccggtgttaatttccgtgacgttctactcgctctcgggatgtatccccagaaagctgacatggggacagaagcagctggtgttgtaacagcagtgggacctgatgtcgatgcgtttgcgcctggtgatagagttctagggctattccaaggggcatttgctccaattgcggtgactgaccatcgtttactggcacgggtgccagacgggtggtcagatgccgatgcggcggcggtgccaatagcttacacgacagcacattatgcgctgcacgacctggcggggttgcgggcggggcaatctgtcctgatacacgcggcagcgggtggtgttggtatggccgctgttgcactggcacggagggccggcgcagaagttctggctaccgcaggacctgcaaaacacggtacgctacgggcattagggctagatgatgaacacatcgcttcgagtcgggagaccgggttcgcgcgtaagttccgagagcggactgggggacgaggagtggacgtcgttctaaacagcttgaccggcgaactattagacgagtccgcggatctcctcgcggaggacggagtcttcgtggaaatgggaaagactgatctgcgcgatgcaggggactttcgtgggcgctacgccccgtttgatctaggggaagcaggcgatgacaggctcggggaaattctacgtgaggtggtgggactgctcggtgcaggggaactcgaccgactccctgttagcgcgtgggaattggggataccccagacggggaagtcgttagtgacgctgccacccgaacaagcgcaagttttcagaccagacggcactgtattgatcaccgggggaacgggaacgttaggtcggctgctggcccgtcatctggttacagagcacggggtgcgtcacctgctgctagtgtcgaggagaggagcagatgcccctggatcggacgagctgagggccgaaatcgaggatctcggagcatcagcggaaattgcagcatgtgatacagccgatcgagacgctctcagcgcgttgctagatggactgccgaggccactgaccggagtagttcacgccgcgggagtcctcgctgacggtctggttacatccatcgacgagcccgcagtcgaacaagttctccgtgcaaaagttgatgcggcctggaacctgcacgagctaactgcgaacaccggtctcagctttttcgtgctgttctcgtcagccgcaagtgtgttagcggggccggggcagggagtatatgcggcagcgaacgaatctttaaacgctctggccgctctgcgtaggactaggggtttacccgcaaaagcattgggatggggattatgggcgatagggcgtgcaatagcatttgccgagcagaccggtgacgcaatcgccccggaggaaggcgcgtacgccttcgagacactactcagacataacagggcgtactcgggttacgctcccgtgatagggtcaccatggctgactgcgttcgcccaacattcgccctttgcggagaagttccagtccctggggcaaaatagatccgggacgtctaagtttctggcagaattagtcgatctgccaagagaagaatggccagatcggttacgtcgtctattagaactggtgaggtctcatgctgccgcagtttcggggtatggatcggcagaccaattaccagaaagaaaagcattcaaagacctcggattcgattcactggcagcagtcgaactaagaaatcgtctagggaccgcgacaggcgtccggctgcccagtactctggtgttcgaccacccaaccccacttgcggttgcggaacatctacgtgatcgtctaacatccggggaagataaccctatccccctatgtcaaggcgatggggaggagatgagcacatggctacgtcgttttggacccccagtcgaacatcgggccaggctagtgtgtttcccccacgcaggcgcagcggcggattcatacttagacctagcaagagcgttagcaccagagatcgatgttcatgctgttcaataccccggcaggcaagacagaagggacgaggagccattaggaaccgcaggtgaaattgcagatgaagtggcagcggtgctacgtgcgtcgggaggggatgggccttttgcacttttcggccacagtatgggcgccctcatcgcgtacgagacagcaaggcgattagagagggaaccgggagggggacccttacgtttattcgtgagcggacaaacagcgccacgtgtccatgaacgaagaactgatctgcccggtgacgatggactcgtggacgagcttaggcgacttggcacctccgaggcagcgctcgcagacgaagccctgctggctatgtctctcccggtgctcagggcggattatagggtgttaagatcctacgcttgggcggatggtcccccactacgcgccggtataactgccctctgcggtgatgcagacccactaactgcaacaggggatgcggaacgctggttacaacattccgtgattccgggtcggacacggacatttcccggtgggcatttttatttaggggaacaagtgaccgaggtggcaggggctgtccgtagagatttactgagagcagggttagcgggttga

SEQ ID NO: 23 - DNA, 12939 bp, Artificial Sequence
  MHO
atgaacccaccctgcgggccagtccgtgcgaattgcgtacacatatccatagatttccccatgccagtttccaaagtttccggtcctcgatcaaggacaaccagccggaggacacccgtccggattggggccgtggtggtggcaagctcgactagcgaactccttgatgggctcgcagcggttgctgatggtaggccacacgccagcgtagttaggggcgttgcgcgcccttctgcgccggttgtattcgttttcccaggtcaaggagcgcaatgggctgggatggcgggggagctactcggggagagtcgggtctttgcagccgctatggacgcctgcgcgagggcgttcgaacctgtaaccgattggacattggcccaagttttggattcaccagagcaatcccggcgtgtagaggtcgtccaacccgccctttttgcagtgcagacctctttggctgcactctggagatctttcggcgtgacacccgacgcagtcgtagggcactctatcggggagcttgcggcggcgcacgtctgtggggcagccggggcagctgacgcggcaagagctgccgcactgtggtcacgagaaatgatcccactagtggggaacggtgacatggcggcggttgcactctcggcagatgagattgaaccacggatcgcccgttgggacgacgacgtcgtgcttgctggtgttaatggtccccgctcggttttactaaccggcagccctgaaccagtagcaagaagggtacaagaactttcggcagagggagttcgggcacaggtcattaatgtgagcatggcggcccattccgcgcaggtggacgatattgcagaagggatgagatcggctctggcgtggtttgccccaggcgggtccgaagttccattttacgccagcctcactgggggagccgtggacacgcgagaactcgttgcggattactggcgacgctcattcagactgcccgttcgtttcgatgaagctataagatcagccctggaagttgggccaggtacattcgtcgaggcctcaccccacccagtcctggcggctgccctacagcagacactggacgcagaggggtcgtcggcagcggtggtccccacattacagcgggggcaaggcggaatgcgtcggttcctcttggcagcggcacaggcattcactggaggagtggccgtcgattggaccgcggcctatgatgatgtggggcctaacccggccctatgtcgatcgtctcggcgcccaagacggaaaacttcgcgaccgtcaccagcttcgacgggaacaagacatagaacttgctgcgaacggctgctcgccgtcgtgaacggcgaaactgccgcattagccggacgtgaagcagatgcagaggcaacctttcgagagcttgggttagattccgttctggcggcccagctcagagctaaagtatccgcggcgataggtcgagaagtcaatattgcactactctatgaccacccaaccccgagagcactcgcagaggcacttgctggcctaccccaggaaattaaacacacgccggcggttcggaccacatccgaagatccaattgccatagtatccatggcttgccggttacccggtggtgtgaataccccacagagactatgggaattattacgtgaagggggagaaaccctcagtggcttccctaccgaccgagggtgggacctcgcgaggttgcatcacccagacccagacaaccccggtacgtcatacgttgataaagggggattcctggacgatgcggcagggtttgacgcagaatttttcggtgtgagccccagagaagcagcggctatggacccgcagcagagattactcctcgaaaccagctgggagttagtcgagaatgcagggattgatccacatagcctaagggggaccgccactggtgtcttcctcggcgttgccaagtttgggtatggcgaggatacggcagctgccgaagacgtcgaggggtactctgtcactggtgtagccccggcagtggcgtcgggcagaattagttacacgatggggttggaagggccgtctatttcggttgataccgcctgttcctccagtctggttgcactccaccttgcagtcgagtcgctccggaaaggagaaagcagtatggccgtggtcgggggagcggcggtgatggccacaccgggtgtgtttgtggatttttcccgacagagagccttggccgcggatgggcgttcaaaggcgttcggagcaggtgcagacgggtttggatttagcgaaggtgtgacactggttctcctagaaagattaagtgaagcccggcgtaacggccatgaggtgctggcagttgttagaggttccgcattaaaccaggacggggcttcgaacgggctgagcgccccctcgggcccggcacagagaagagtgatacgccaagcactcgaatcgtgtggcctagaaccaggtgacgttgacgcggtggaagcgcacgggacaggaactgcgttaggggacccgatagaagcaaacgccttgctggacacttatggtagagatcgtgatgcggatcgacccctctggttaggaagtgttaagtcaaatataggacacactcaggcagcggcgggagtaactgggctgctcaaagtagtcctagccttacgcaatggggaactacccgccaccctacatgtcgaggaaccgacaccgcatgtggattggtcgagcgggggagttgctctcttggcgggtaatcagccgtggcgaagaggtgaacgaacccgtagagccgccgtgtccgcattcgggatcagtggtacgaacgcgcacgtgattgtggaagaagctccacaagaggtgagaccagcgcccggtcaaggactctcgcccgcggtgtcaaccttggtagtggcgggtaaaactatgcagcgtgtttcggcaaccgccggtatgctcgcagattggatggaaggcccaggtgcagatgtggcgctggcggacgtggcgcacacgttaaatcatcaccgttcacggcaaccaaagttcggtacggtggtggccagggaccggacacaggcaatcgccggactaagagcgctggcggcgggtcagcacgccccaggggttgttaaccctgctgaaggaagtccaggtccagggacggtgttcgtgtttcctggccaggggtcccagcgtgcaggcatgggggaggagttggctgcggctttccccgtgtttgccagaatccaccagcaagtgtgggatttactcgatgttcctgatctcgacgttaacgaaacggggtacgcacaaccagcactcttcgcactccaagtggcgctgtttgggctcctcgaatcatggggagtacggccggatgccgtggtcgggcatagtgtaggggaattagcggcagggtacgtttccgggctttggagtcttgaggatgcttgcacgctcgtgtcggcgagagcccgtctaatgcaagccttaccggcaggtggtgttatggcggcagttccagtgtccgaagacgaagcacgggctgtgttgggggaaggagtcgaaatagctgcggtcaacggtccgtcgagcgtggttctaagcggtgatgaagcagcagtgctccaggccgcggaagggttaggcaagtggacgcgattaccgacctcgcatgcattccattctgctcgtatggaaccaatgctggaagagtttagagcagtggcggaaggtctaacatacaggactccccaggtggcaatggccgccggagaccaggttatgaccgctgaatactgggtgcgtcaggttagggatacagttcgttttggcgagcaagttgcctcgttcgaggatgctgtattcgtggaattgggagcagatcgctctcttgcacggctagtcgatggtatcgcgatgttgcacggggatcatgaggcacaggctggtatgcggagagaacaacccttgcccttaggtttacgaagattgctaaccgacctgcataacgctggtgctgccgtcgattttagtgttttgtgcccacaaggtcgtctggttgacgcaccgttaccagcctggtcacaccggtttctcttctatgaccgggaaggagtggacaatagatcaccagggggaagcacagtggcggtccacccgcttttactagccgcggtggatgtgccgggccacggtggagcggttttcacgggtagactctcgactgacgagcaaccgtggttagcggagcacgttgtcgggggaagaaccctagttcctggttctgttttagtcgatctagccttagcggcaggcgaagacgtagggctaccggtgttagaagaattagtattgcagaggccgctggtgcttgccggcgcgggagcactcctacggatgtcggtcggggcaccagacgagagcggtagaagaactatcgatgttcacgcagctgaagacgtcgccgatttagcagatgcccaatggtcccagcacgccaccgggactttagcccaaggggtagcggcggggcccagggacacagagcaatggcccccagaggatgccgtccggattccattagacgaccattatgatggtctcgcggaacagggttatgagtacggtccgtcgtttcaggcgctagtggcctacgtggcggaggatgcgactgcgacaatgttagcggaagtcgcgcttccgggcagcattagatcgcaacaaggtctatacgccatccatcccgcactgctggacgcttgttttcaatctgtcggagcccacccagacagtcaatccgtcgggtcaggtctactcgtacccctcggtgttcggagagttcgtgcgtacgcacccgtaaggaccgcccgttattgttacacccgcgtcacgaaagttgaactagctggggttgaggccgacatcgacgttctggatgctcacggcacagtgcttctagccgtgtgcggtcttcgtatcgggaccggagtgagcgagagggacaaacacaacagagttctcaatgagcgcctactcaccatcgaatggcatcagcgtgaactaccagaaatggacccctcgggtgccgggaagtggctcctaatctcggactgtgcagcatccgatgtcaccgctacacgactggctgatgccttccgggagcacagcgctgcgtgcactaccatgcggtggccacttcacgatgatcaactagcagccgccgaccaactccgggaccaggtgggttcagatgagttttctggcgtggtagtactaacagggccaaacacagggacccctcatcagggttccgcagaccgtggcgccgagtacgttaggcggttagttggaatcgctcgtgaacttagcgatcttcccggagcggttccccgtatgtatgtcgtcacaaggggagcgcagagagtccttgccgatgattgtgttaatttagaacagggagggctcagaggtctgctgaggaccatcggtgctgagcacccacatctccgcgccacccaaattgatgttgatgagcagacaggagtagagcagctggcgcgacaactcctagctacatcggaggaagacgagacagcctggagggacaacgaatggtacgttgcgaggttatgccccacacccctgaggccacaggaacgtaggacaatagtggcggaccatcaacagtctggtatgcggttacaaatacgtacgcccggtgcaatcgatagtgtggcctttgaacccgcacccgatgtagagcaacccttacgggcgggtgaagttcgggttgacgttagagcaaccggtgttaatttccgtgacgttctactcgctctcgggatgtatccccagaaagctgacatggggacagaagcagctggtgttgtaacagcagtgggacctgatgtcgatgcgtttgcgcctggtgatagagttctagggctattccaaggggcatttgctccaattgcggtgactgaccatcgtttactggcacgggtgccagacgggtggtcagatgccgatgcggcggcggtgccaatagcttacacgacagcacattatgcgctgcacgacctggcggggttgcgggcggggcaatctgtcctgatacacgcggcagcgggtggtgttggtatggccgctgttgcactggcacggagggccggcgcagaagttctggctaccgcaggacctgcaaaacacggtacgctacgggcattagggctagatgatgaacacatcgcttcgagtcgggagaccgggttcgcgcgtaagttccgagagcggactgggggacgaggagtggacgtcgttctaaacagcttgaccggcgaactattagacgagtccgcggatctcctcgcggaggacggagtcttcgtggaaatgggaaagactgatctgcgcgatgcaggggactttcgtgggcgctacgccccgtttgatctaggggaagcaggcgatgacaggctcggggaaattctacgtgaggtggtgggactgctcggtgcaggggaactcgaccgactccctgttagcgcgtgggaattggggataccccagacggggaagtcgttagtgacgctgccacccgaacaagcgcaagttttcagaccagacggcactgtattgatcaccgggggaacgggaacgttaggtcggctgctggcccgtcatctggttacagagcacggggtgcgtcacctgctgctagtgtcgaggagaggagcagatgcccctggatcggacgagctgagggccgaaatcgaggatctcggagcatcagcggaaattgcagcatgtgatacagccgatcgagacgctctcagcgcgttgctagatggactgccgaggccactgaccggagtagttcacgccgcgggagtcctcgctgacggtctggttacatccatcgacgagcccgcagtcgaacaagttctccgtgcaaaagttgatgcggcctggaacctgcacgagctaactgcgaacaccggtctcagctttttcgtgctgttctcgtcagccgcaagtgtgttagcggggccggggcagggagtatatgcggcagcgaacgaatctttaaacgctctggccgctctgcgtaggactaggggtttacccgcaaaagcattgggatggggattatgggcgatagggcgtgcaatagcatttgccgagcagaccggtgacgcaatcgccccggaggaaggcgcgtacgccttcgagacactactcagacataacagggcgtactcgggttacgctcccgtgatagggtcaccatggctgactgcgttcgcccaacattcgccctttgcggagaagttccagtccctggggcaaaatagatccgggacgtctaagtttctggcagaattagtcgatctgccaagagaagaatggccagatcggttacgtcgtctattagaactggtgaggtctcatgctgccgcagtttcggggtatggatcggcagaccaattaccagaaagaaaagcattcaaagacctcggattcgattcactggcagcagtcgaactaagaaatcgtctagggaccgcgacaggcgtccggctgcccagtactctggtgttcgaccacccaaccccacttgcggttgcggaacatctacgtgatcgtctacctggaattggggcgctagttcccgctcccgtggtaatcgcagcaggccgtacggaggaaccaattgccatcgtttcgatggcatgtcgtttaccgggaggagtcaatacgccccaacggctctgggaattactacgggagggtggtgaaaccttgtccgggttcccaacggaccgtggctgggacctagcacggcttcaccaccctgatccggacaaccccggaacgagctacgttgataagggtggatttctcgacgacgcggcgggtttcgacgcagagtttttcggggtttcaccaagggaagctgccgctatggaccctcagcaacgattacttttagagacctcgtgggagctagttgaaaatgcgggcatagatccacatagcctgcgagggacagcgacaggggtgttcctaggagttgcgaagtttggttatggtgaggacacagcagcagcggaagatgttgaaggttattcagttaccggtgttgctcccgctgtggcatctggccgcatatcctacactatgggtttagaaggtccttccatctcggtcgataccgcatgctcaagctcgctagtcgcgcttcatctagccgtagagtccctccgaaagggtgagtcatctatggcggtggtgggtggtgcagccgttatggcgactcctggggtatttgttgatttttcacgccaacgggcgcttgccgcagacggccgttccaaagcgttcggggcaggtgcagatggttttggtttcagcgagggagtcacgctggttctactagagcgtttaagtgaggcgcgtcgtaacggtcatgaagttctagctgtagtgcgcgggtccgcgttaaaccaggacggagcgagcaacggactttcagcaccctccggccctgcgcaacgtagagtaataaggcaagcgctcgaatcgtgtgggcttgaaccgggggatgttgacgcggttgaggcgcatggtactggtacagcactaggtgacccaatagaggccaatgcgctgttggacacttacgggcgagaccgtgatgcggatcgtccactttggttggggtccgttaagagcaatattgggcacactcaagctgcggccggggttacaggactgctgaaggttgtgttagcactgcgcaatggtgagctacctgcaacgttacatgtcgaggaaccaactccacacgtcgattggtcctcaggtggtgtcgcattactggcgggtaatcaaccatggcgaaggggagaaaggaccagaagggcggcagtgagcgcctttggtatctccggtacaaatgctcacgtgatagtggaagaggcgcctcaggaagttcgacccgcccctggccaagggctgtcgccagccgtgtccacgttagttgttgcaggtaaaaccatgcagcgtgtaagtgcgacagctggaatgcttgcagactggatggagggtcctggggccgatgttgcattggcggatgtggcccataccctgaaccatcaccgatcaagacagcccaagttcgggacggttgtagcgcgtgacaggactcaggcgatagctgggctccgtgcattggcggctggtcaacatgctcctggggtcgtcaacccagctgaaggttccccaggaccaggcaccgtgttcgtttttcccggtcaaggttcgcagagggcagggatgggggaggaactcgcggcagcctttcctgtcttcgctcgaatacatcagcaagtttgggacctcctagatgttcccgacctcgacgttaatgaaaccgggtacgcccaaccagcgctgttcgcgcttcaggtcgcgctctttggccttctggagtcgtggggtgttaggccagatgcagtggtagggcactcagttggtgagctggccgcggggtacgtgtccggtctttggtcactagaggacgcctgcacactagtctcagcaagagcgcgcctaatgcaggcactgcctgctggaggggtgatggcggcagtccccgtctccgaggatgaggcgcgggccgtcctgggcgagggagttgaaattgcggctgtgaatggaccctcgtccgttgtgctctcaggggacgaggcggcagtcttacaggccgccgaaggtctaggtaagtggacgcgactgccgaccagccatgcttttcactcagcgagaatggaacccatgctagaagagtttcgggccgtagcagagggtctgacctatcgtacccctcaagtagctatggctgctggggatcaggtgatgacagcagaatattgggtgcggcaggttcgggacacagttcgcttcggggagcaagtagcgtcattcgaggatgcggtgtttgttgagttaggcgctgacagaagtctagcgcgtttggtggacggcatcgccatgctgcacggtgaccacgaagcgcaggccgcggaccataggcaaatcaccgaagcggttgcggatgcttacgtcttaggccaccttccggattttgcggcgctgcggcggcctcacgcacgaaagttggacttaccaacttatcccttcgagcgtagacagtactggttcagagatgcgcgtgagaggccggaacaacccagagataccggcggacctcgcacagaagcagtccgtctgttagaggatggtaggattgaagaattagctgcacttttgggaggggccagtgatgaccaacacacattacaggtgctgactaagttggcggcgcaacataaccaacaacgaacaacccggtcaatcgctgacgacaggtacgaaataaggtgggaccgatcgacttccccactatccggagcagatgttgaccaagcggggagctggatcgtggtgtcagatgacgcagatgccgttcccccgctagtggacttgctggctgcacgtaacgagccccatcaggttgttggtctacccgcttcggacgcagacgaggagaggctcgcagagactctgcgtgcggctgcgactgaagatgctacccttcggatagtccacgttgcggcgctcgaagcaggcgctacccccagcatgcgttcactgctccgcatgcagcaccgaatactaggtggcacgcggcgggtgttcagggcagcggtcgcagcggagttaagaggtcccatttggatagtgacgcggggagcacaaagagtggctgacaccgatacagttgccccgcatcagtcatgcctctggggatttgggagggcagcatcgctggagctgccgcacgtttggggtggcctagcagatttatcagagggcggtgacaatgcggccgatgagtggagtgcgctagtggaccgcattgccgcaccccacggttcagcagttagggaggaccaactggcgctgagagacagggccgtatatacgccaagactggccagacgttctgcgcccccgagcgggactcccctacatctacgaggggatggcacagtgttaataacaggtgggactggtacactaggtaggctattagcgcgtcacctagtaacagagcatggggtgcggcatctcttactagtttcaaggagaggcgccgatgcccctggctcggatgaactgcgcgcagaaatagaggacttaggtgccagcgcggagatcgcagcgtgtgatacagcggatcgcgatgccctatctgccctactagatggtctcccccggccccttacgggtgtcgttcacgccgctggcgtgttagccgatggacttgtcactagcattgacgagcctgcggtggaacaggttctccgagcaaaggtggacgcggcatggaacctacacgaactcacagctaataccgggctatcctttttcgttcttttctcatcagcagcatcggtcctggcaggtccagggcaaggagtttatgcggctgcaaatgaatcgctcaacgcactagctgcgttaaggcgaactaggggtctgccggccaaggctctgggatggggcctgtgggccatcgggcgggcaatcgcttttgcggagcagaccggggacgccatcgctccagaggaaggagcatacgcttttgaaactctgttaaggcataaccgtgcctactcgggatatgcgcccgtcattggatctccctggttgaccgcgttcgcacagcattccccctttgcagaaaaattccaatcactcggacagaatcggtcagggacatcgaaattcttagcggagctagttgacctgcctcgtgaggaatggccggataggctcaggagactactagagttagttaggtcccatgccgccgcggtctccggttacggtagtgcagatcaactgccggaaagaaaagcgttcaaggatttggggtttgattcgctggccgccgttgaactgcgtaaccggctgggaacggctacaggggtacgactgccgtcaaccctagtatttgatcacccaactccgctggccgtcgctgagcacttaagagataggctaacatccggggaagataaccctatccccctatgtcaaggcgatggggaggagatgagcacatggctacgtcgttttggacccccagtcgaacatcgggccaggctagtgtgtttcccccacgcaggcgcagcggcggattcatacttagacctagcaagagcgttagcaccagagatcgatgttcatgctgttcaataccccggcaggcaagacagaagggacgaggagccattaggaaccgcaggtgaaattgcagatgaagtggcagcggtgctacgtgcgtcgggaggggatgggccttttgcacttttcggccacagtatgggcgccctcatcgcgtacgagacagcaaggcgattagagagggaaccgggagggggacccttacgtttattcgtgagcggacaaacagcgccacgtgtccatgaacgaagaactgatctgcccggtgacgatggactcgtggacgagcttaggcgacttggcacctccgaggcagcgctcgcagacgaagccctgctggctatgtctctcccggtgctcagggcggattatagggtgttaagatcctacgcttgggcggatggtcccccactacgcgccggtataactgccctctgcggtgatgcagacccactaactgcaacaggggatgcggaacgctggttacaacattccgtgattccgggtcggacacggacatttcccggtgggcatttttatttaggggaacaagtgaccgaggtggcaggggctgtccgtagagatttactgagagcagggttagcgggttga

SEQ ID NO: 24 - DNA, 13278 bp, Artificial Sequence
  MHS
atgaacccaccctgcgggccagtccgtgcgaattgcgtacacatatccatagatttccccatgccagtttccaaagtttccggtcctcgatcaaggacaaccagccggaggacacccgtccggattggggccgtggtggtggcaagctcgactagcgaactccttgatgggctcgcagcggttgctgatggtaggccacacgccagcgtagttaggggcgttgcgcgcccttctgcgccggttgtattcgttttcccaggtcaaggagcgcaatgggctgggatggcgggggagctactcggggagagtcgggtctttgcagccgctatggacgcctgcgcgagggcgttcgaacctgtaaccgattggacattggcccaagttttggattcaccagagcaatcccggcgtgtagaggtcgtccaacccgccctttttgcagtgcagacctctttggctgcactctggagatctttcggcgtgacacccgacgcagtcgtagggcactctatcggggagcttgcggcggcgcacgtctgtggggcagccggggcagctgacgcggcaagagctgccgcactgtggtcacgagaaatgatcccactagtggggaacggtgacatggcggcggttgcactctcggcagatgagattgaaccacggatcgcccgttgggacgacgacgtcgtgcttgctggtgttaatggtccccgctcggttttactaaccggcagccctgaaccagtagcaagaagggtacaagaactttcggcagagggagttcgggcacaggtcattaatgtgagcatggcggcccattccgcgcaggtggacgatattgcagaagggatgagatcggctctggcgtggtttgccccaggcgggtccgaagttccattttacgccagcctcactgggggagccgtggacacgcgagaactcgttgcggattactggcgacgctcattcagactgcccgttcgtttcgatgaagctataagatcagccctggaagttgggccaggtacattcgtcgaggcctcaccccacccagtcctggcggctgccctacagcagacactggacgcagaggggtcgtcggcagcggtggtccccacattacagcgggggcaaggcggaatgcgtcggttcctcttggcagcggcacaggcattcactggaggagtggccgtcgattggaccgcggcctatgatgatgtggggcctaacccggccctatgtcgatcgtctcggcgcccaagacggaaaacttcgcgaccgtcaccagcttcgacgggaacaagacatagaacttgctgcgaacggctgctcgccgtcgtgaacggcgaaactgccgcattagccggacgtgaagcagatgcagaggcaacctttcgagagcttgggttagattccgttctggcggcccagctcagagctaaagtatccgcggcgataggtcgagaagtcaatattgcactactctatgaccacccaaccccgagagcactcgcagaggcacttgctggcctaccccaggaaattaaacacacgccggcggttcggaccacatccgaagatccaattgccatagtatccatggcttgccggttacccggtggtgtgaataccccacagagactatgggaattattacgtgaagggggagaaaccctcagtggcttccctaccgaccgagggtgggacctcgcgaggttgcatcacccagacccagacaaccccggtacgtcatacgttgataaagggggattcctggacgatgcggcagggtttgacgcagaatttttcggtgtgagccccagagaagcagcggctatggacccgcagcagagattactcctcgaaaccagctgggagttagtcgagaatgcagggattgatccacatagcctaagggggaccgccactggtgtcttcctcggcgttgccaagtttgggtatggcgaggatacggcagctgccgaagacgtcgaggggtactctgtcactggtgtagccccggcagtggcgtcgggcagaattagttacacgatggggttggaagggccgtctatttcggttgataccgcctgttcctccagtctggttgcactccaccttgcagtcgagtcgctccggaaaggagaaagcagtatggccgtggtcgggggagcggcggtgatggccacaccgggtgtgtttgtggatttttcccgacagagagccttggccgcggatgggcgttcaaaggcgttcggagcaggtgcagacgggtttggatttagcgaaggtgtgacactggttctcctagaaagattaagtgaagcccggcgtaacggccatgaggtgctggcagttgttagaggttccgcattaaaccaggacggggcttcgaacgggctgagcgccccctcgggcccggcacagagaagagtgatacgccaagcactcgaatcgtgtggcctagaaccaggtgacgttgacgcggtggaagcgcacgggacaggaactgcgttaggggacccgatagaagcaaacgccttgctggacacttatggtagagatcgtgatgcggatcgacccctctggttaggaagtgttaagtcaaatataggacacactcaggcagcggcgggagtaactgggctgctcaaagtagtcctagccttacgcaatggggaactacccgccaccctacatgtcgaggaaccgacaccgcatgtggattggtcgagcgggggagttgctctcttggcgggtaatcagccgtggcgaagaggtgaacgaacccgtagagccgccgtgtccgcattcgggatcagtggtacgaacgcgcacgtgattgtggaagaagctccacaagaggtgagaccagcgcccggtcaaggactctcgcccgcggtgtcaaccttggtagtggcgggtaaaactatgcagcgtgtttcggcaaccgccggtatgctcgcagattggatggaaggcccaggtgcagatgtggcgctggcggacgtggcgcacacgttaaatcatcaccgttcacggcaaccaaagttcggtacggtggtggccagggaccggacacaggcaatcgccggactaagagcgctggcggcgggtcagcacgccccaggggttgttaaccctgctgaaggaagtccaggtccagggacggtgttcgtgtttcctggccaggggtcccagcgtgcaggcatgggggaggagttggctgcggctttccccgtgtttgccagaatccaccagcaagtgtgggatttactcgatgttcctgatctcgacgttaacgaaacggggtacgcacaaccagcactcttcgcactccaagtggcgctgtttgggctcctcgaatcatggggagtacggccggatgccgtggtcgggcatagtgtaggggaattagcggcagggtacgtttccgggctttggagtcttgaggatgcttgcacgctcgtgtcggcgagagcccgtctaatgcaagccttaccggcaggtggtgttatggcggcagttccagtgtccgaagacgaagcacgggctgtgttgggggaaggagtcgaaatagctgcggtcaacggtccgtcgagcgtggttctaagcggtgatgaagcagcagtgctccaggccgcggaagggttaggcaagtggacgcgattaccgacctcgcatgcattccattctgctcgtatggaaccaatgctggaagagtttagagcagtggcggaaggtctaacatacaggactccccaggtggcaatggccgccggagaccaggttatgaccgctgaatactgggtgcgtcaggttagggatacagttcgttttggcgagcaagttgcctcgttcgaggatgctgtattcgtggaattgggagcagatcgctctcttgcacggctagtcgatggtatcgcgatgttgcacggggatcatgaggcacaggctggtatgcggagagaacaacccttgcccttaggtttacgaagattgctaaccgacctgcataacgctggtgctgccgtcgattttagtgttttgtgcccacaaggtcgtctggttgacgcaccgttaccagcctggtcacaccggtttctcttctatgaccgggaaggagtggacaatagatcaccagggggaagcacagtggcggtccacccgcttttactagccgcggtggatgtgccgggccacggtggagcggttttcacgggtagactctcgactgacgagcaaccgtggttagcggagcacgttgtcgggggaagaaccctagttcctggttctgttttagtcgatctagccttagcggcaggcgaagacgtagggctaccggtgttagaagaattagtattgcagaggccgctggtgcttgccggcgcgggagcactcctacggatgtcggtcggggcaccagacgagagcggtagaagaactatcgatgttcacgcagctgaagacgtcgccgatttagcagatgcccaatggtcccagcacgccaccgggactttagcccaaggggtagcggcggggcccagggacacagagcaatggcccccagaggatgccgtccggattccattagacgaccattatgatggtctcgcggaacagggttatgagtacggtccgtcgtttcaggcgctagtggcctacgtggcggaggatgcgactgcgacaatgttagcggaagtcgcgcttccgggcagcattagatcgcaacaaggtctatacgccatccatcccgcactgctggacgcttgttttcaatctgtcggagcccacccagacagtcaatccgtcgggtcaggtctactcgtacccctcggtgttcggagagttcgtgcgtacgcacccgtaaggaccgcccgttattgttacacccgcgtcacgaaagttgaactagctggggttgaggccgacatcgacgttctggatgctcacggcacagtgcttctagccgtgtgcggtcttcgtatcgggaccggagtgagcgagagggacaaacacaacagagttctcaatgagcgcctactcaccatcgaatggcatcagcgtgaactaccagaaatggacccctcgggtgccgggaagtggctcctaatctcggactgtgcagcatccgatgtcaccgctacacgactggctgatgccttccgggagcacagcgctgcgtgcactaccatgcggtggccacttcacgatgatcaactagcagccgccgaccaactccgggaccaggtgggttcagatgagttttctggcgtggtagtactaacagggccaaacacagggacccctcatcagggttccgcagaccgtggcgccgagtacgttaggcggttagttggaatcgctcgtgaacttagcgatcttcccggagcggttccccgtatgtatgtcgtcacaaggggagcgcagagagtccttgccgatgattgtgttaatttagaacagggagggctcagaggtctgctgaggaccatcggtgctgagcacccacatctccgcgccacccaaattgatgttgatgagcagacaggagtagagcagctggcgcgacaactcctagctacatcggaggaagacgagacagcctggagggacaacgaatggtacgttgcgaggttatgccccacacccctgaggccacaggaacgtaggacaatagtggcggaccatcaacagtctggtatgcggttacaaatacgtacgcccggtgcaatcgatagtgtggcctttgaacccgcacccgatgtagagcaacccttacgggcgggtgaagttcgggttgacgttagagcaaccggtgttaatttccgtgacgttctactcgctctcgggatgtatccccagaaagctgacatggggacagaagcagctggtgttgtaacagcagtgggacctgatgtcgatgcgtttgcgcctggtgatagagttctagggctattccaaggggcatttgctccaattgcggtgactgaccatcgtttactggcacgggtgccagacgggtggtcagatgccgatgcggcggcggtgccaatagcttacacgacagcacattatgcgctgcacgacctggcggggttgcgggcggggcaatctgtcctgatacacgcggcagcgggtggtgttggtatggccgctgttgcactggcacggagggccggcgcagaagttctggctaccgcaggacctgcaaaacacggtacgctacgggcattagggctagatgatgaacacatcgcttcgagtcgggagaccgggttcgcgcgtaagttccgagagcggactgggggacgaggagtggacgtcgttctaaacagcttgaccggcgaactattagacgagtccgcggatctcctcgcggaggacggagtcttcgtggaaatgggaaagactgatctgcgcgatgcaggggactttcgtgggcgctacgccccgtttgatctaggggaagcaggcgatgacaggctcggggaaattctacgtgaggtggtgggactgctcggtgcaggggaactcgaccgactccctgttagcgcgtgggaattggggataccccagacggggaagtcgttagtgacgctgccacccgaacaagcgcaagttttcagaccagacggcactgtattgatcaccgggggaacgggaacgttaggtcggctgctggcccgtcatctggttacagagcacggggtgcgtcacctgctgctagtgtcgaggagaggagcagatgcccctggatcggacgagctgagggccgaaatcgaggatctcggagcatcagcggaaattgcagcatgtgatacagccgatcgagacgctctcagcgcgttgctagatggactgccgaggccactgaccggagtagttcacgccgcgggagtcctcgctgacggtctggttacatccatcgacgagcccgcagtcgaacaagttctccgtgcaaaagttgatgcggcctggaacctgcacgagctaactgcgaacaccggtctcagctttttcgtgctgttctcgtcagccgcaagtgtgttagcggggccggggcagggagtatatgcggcagcgaacgaatctttaaacgctctggccgctctgcgtaggactaggggtttacccgcaaaagcattgggatggggattatgggcgatagggcgtgcaatagcatttgccgagcagaccggtgacgcaatcgccccggaggaaggcgcgtacgccttcgagacactactcagacataacagggcgtactcgggttacgctcccgtgatagggtcaccatggctgactgcgttcgcccaacattcgccctttgcggagaagttccagtccctggggcaaaatagatccgggacgtctaagtttctggcagaattagtcgatctgccaagagaagaatggccagatcggttacgtcgtctattagaactggtgaggtctcatgctgccgcagtttcggggtatggatcggcagaccaattaccagaaagaaaagcattcaaagacctcggattcgattcactggcagcagtcgaactaagaaatcgtctagggaccgcgacaggcgtccggctgcccagtactctggtgttcgaccacccaaccccacttgcggttgcggaacatctacgtgatcgtctactgccagtagaacagccttttgtgcactcaccggaagagcggtatcgaccattcgcgttaacggatgttcagcaagcctacctggtcgggcgccagccgggatttgccctgggcggtgtaggctcgcatttcttcgtggaattcgagatcgcagatctcgacatacaccgcctggaaaaagtgtggaaccgtttaattgcacgtcatgatatgttgcgcgctgtggttcgtgacggtcagcaacgtgtactggaacagaccccgccatgggtcataccagcacatattcttcacagtcctgaagaggcattacaggttcgtgatcgtttagctcaccaagtgttgaaccccgaagtctggccggtatttgatctgcaggtgggcttcgttgacggtatgccggcccgtttatggttgtgccttgataacctgttattggacgggctgagcatgcagattcttctctctgaactggagcatggatatcgctacccacagcaactccctcccccgttgccgatcacttttcgcgattatcttcagcaaccggcactccgtaccccaaatcctgactcattggcttggtggcagacgcaactggatgacatcccacctgcgcccgccctcccgctacgttgtctgcctcaagatgttgaaaccccgcgtttcgcgcgtctgtacggcgcaatggattctgctcgttggcgtcgcctgaaacagcgtgcggccgacgcacatctgactccgtcagctgtcctactgagcgtatggtctacagtgctggcagcttggtcggcgcagccggattttactctcaacctgacattattcgaccggcgaccactgcaccctcagattaatcaaatccttggcgattttacctcactgatgttattgtcgtggcatccgggtgagagttggctgcagtccgcgcgtcttctccagcaacgcctttcagaatcgctcaaccaccgtgatgttagcgccattcgcgtcatgcggcagctggcgagaaggcaaaatgtcccggccgtacccatgccggtcgtatttacctctgcgctggggtttgaacaggataacttcctggcccgtcgcaatctactgaaaccggtgtggggtatcagtcagacgccgcaagtttggctggaccatcaggtctatgaatccgagggcgaactgcgttttaactgggatttcgttgcggccctgtttccggacggtcaagtggaacgtcagttcgcgcaatactgcgccttattgaatcgcatggcagaagatgacagctcttggcagttgccgcttgctgatctggtgcccccgttaaaagtgaccgagcggcgagcgagaaggctgcgtccagaacgcgcccagcctcgtattgcagctgataagagttccgttagtctgatctgtgacacttttcgtgaggtggttggggaacccgtggcaccggctgagaactttttcgaagcgggagccacatccctcaatctggttcagctgcatgtccttctccaacgtcacgaatttgcgaccttaacgctactggatttgttcacccatccaagccctgttgcattggctaactatcttgcgggtgtggccctggaagagaaaacgaagcgcgtgcggccggttcggcgaagacagcgtcgcattcagcacttgcccttagtagctgcgcaacctggaatatggatggccgagaagttatctgaactaccatcagcgtggagcgtagcgcattacgtggagctcactggtgaggttgactcgcctcttttggccagggcggtagtggctggccttgcacaagctgacaccttaagaatgcgtttcacagaggataatggggaagtttggcaatgggtagacgatgcgttaacatttgagttaccggaaatcatagacctgcgcactaacatagaccctcacgggacagctcaggccttgatgcaagcggacctgcaacaggacctacgtgtggattcggggaagcctctggtcttccatcagctaattcaagtagcggacaatcgctggtactggtatcaaaggtaccaccacttgcttgtggacgggttcagttttccagcgataaccaggcaaatagccaacatttattgcacttggttgcgaggagagcctacgcccgcatcccccttcacgccattcgcagacgttgttgaggaataccaacagtatcgcgagagcgaagcgtggcaacgcgatgcggcattctgggcggagcaacgacggcaactaccgcctcccgcatccctatcacctgccccgctccccggccggtccgcgtcagccgacattctacggctaaagctggagttcacagatggtgaatttcgacagcttgctacacaactcagcggggtacaaaggacagacctagcgctcgctctggctgcattatggctaggacgactttgcaatcgaatggactacgcggcgggtttcatatttatgcgccggctcggcagcgcagcgttgaccgcaacgggtccagttttaaatgttcttcctttgggaatccacataggcaacccaagcttctctgagcttctcaccagggttcgcgaggtcgccttaggcgcgtatgcacaccaacatattccttttgagatgttagtagaggcactgcaaccagagcgaaaccttagccatactcctctcttccaagtgatgtttgtccttcagaatgcgcccgcgtcccaattagagttaaccgggatcaccgcaaacccaattaaggttaaatcaactaccacgaagttcgacctaactttaatcatgcaaaacacagctagcggattagtaggtgtttgggagtacaacacggatttattcgacgcgtcaacgattgagcgaatgacagggcactttgtaaccctcctcgagggcgttatcgccaatccacaacagccgatctctcaacttcctattttaactacagtggagcaacagcaacttttagtcgagtggaataacacgcaaaccgactaccccgctgataagtgtatacatcaattattcgaggaacaggtcgagcgcacaccagacgccgttgctgtcgtctttgggaatcagcaactcagctatcgagagatgcgcgaacaagtggttgcactcgccaatttattacgtgagcggggagtcaagccaggagactccgttgccgtggccttaccacgctctgttttcttaacccttgcactacacgcgattgtcgaggcaggtgccgcctggctacctcttgacacaggatatcctgacgatagattaaaaatgatgctcgaggatgcacggccttcccttctgatcacaacagacgatcaattaccccgcttcagtgacgtacctaatctgacctcactctgttacaacgctcccttgacgcctcaagggagcgcccctttacagctgtctcaacctcaccatactgcatatatcatctttacaagtggttctacgggacgccccaagggagtaatggttggtcagactgcgattgtaaatcgtctgttgtggatgcaaaaccactaccctttgacgggggaggacgttgtagcccaaaagactccttgctcgttcgatgtctcagtctgggagttcttttggccatttatagcaggggccaaattagttatggcggagccggaagcccaccgagacccacttgcgatgcagcaattctttgctgagtatggtgtcaccactacacatttcgtcccatcgatgttagcggccttcgtggcttctcttactccacaaacggctaggcaatcttgtgccacactaaagcaagtcttctgctccggcgaggcattacctgcagacttgtgccgggaatggcagcaactcacaggagctccattgcacaatctatacggaccgaccgaggccgcagtagacgtatcttggtatcctgcgtttggcgaggagttagcgcaagtaagaggttcgtcagtaccaataggataccccgtatggaacacggggcttcggatactggacgcgatgatgcatccggtcccaccaggagtcgcgggcgatttatacctgactgggatacagctggcccaaggttacctagggagacctgaccttacggcgtcgaggttcatagcggatccgtttgctccgggtgagcgcatgtaccgtacgggcgacgtcgcgcgatggctagataatggcgccgtagagtatcttggtagatcagacgatcagttaaagatacggggacaacgaatagagcttggggaaatagaccgggtaatgcaggctttgccagatgtcgagcaagcggtggcttcgtgtgctattgcgcgggaggacatacctgggaacaaacaccttgtagcgtacatagttcctcaagaggagcaaacatgcactgagcgatcgaggtccacacttacagtttcgttcgtccggagtttccttaaggagaaactccccgaatatatggtaccgagcgcaatagtgattctagacgctctccccctgactcctaatggaaagctagaccggcgggcgttacccgcccctgacctgcactcacaacttgagacaattattgctgcggctttctcgagcctgctcgggtgcgacgtacaagacgcggatgctgactttttcgcgctaggtggccattcgctgcttgccatgaagctagccgctcagctttcccgacaagtagcgcggcaggtgacaccaggccaagttatggtagcttcgactgtcgcaaagctcgcaacgatcatagacgcggagttagataaatacgtcgctccaaggaacccgataacatccggggaagataaccctatccccctatgtcaaggcgatggggaggagatgagcacatggctacgtcgttttggacccccagtcgaacatcgggccaggctagtgtgtttcccccacgcaggcgcagcggcggattcatacttagacctagcaagagcgttagcaccagagatcgatgttcatgctgttcaataccccggcaggcaagacagaagggacgaggagccattaggaaccgcaggtgaaattgcagatgaagtggcagcggtgctacgtgcgtcgggaggggatgggccttttgcacttttcggccacagtatgggcgccctcatcgcgtacgagacagcaaggcgattagagagggaaccgggagggggacccttacgtttattcgtgagcggacaaacagcgccacgtgtccatgaacgaagaactgatctgcccggtgacgatggactcgtggacgagcttaggcgacttggcacctccgaggcagcgctcgcagacgaagccctgctggctatgtctctcccggtgctcagggcggattatagggtgttaagatcctacgcttgggcggatggtcccccactacgcgccggtataactgccctctgcggtgatgcagacccactaactgcaacaggggatgcggaacgctggttacaacattccgtgattccgggtcggacacggacatttcccggtgggcatttttatttaggggaacaagtgaccgaggtggcaggggctgtccgtagagatttactgagagcagggttagcgggttga

SEQ ID NO: 25 - DNA, 11616 bp, Artificial Sequence
  MOC
atgaacccaccctgcgggccagtccgtgcgaattgcgtacacatatccatagatttccccatgccagtttccaaagtttccggtcctcgatcaaggacaaccagccggaggacacccgtccggattggggccgtggtggtggcaagctcgactagcgaactccttgatgggctcgcagcggttgctgatggtaggccacacgccagcgtagttaggggcgttgcgcgcccttctgcgccggttgtattcgttttcccaggtcaaggagcgcaatgggctgggatggcgggggagctactcggggagagtcgggtctttgcagccgctatggacgcctgcgcgagggcgttcgaacctgtaaccgattggacattggcccaagttttggattcaccagagcaatcccggcgtgtagaggtcgtccaacccgccctttttgcagtgcagacctctttggctgcactctggagatctttcggcgtgacacccgacgcagtcgtagggcactctatcggggagcttgcggcggcgcacgtctgtggggcagccggggcagctgacgcggcaagagctgccgcactgtggtcacgagaaatgatcccactagtggggaacggtgacatggcggcggttgcactctcggcagatgagattgaaccacggatcgcccgttgggacgacgacgtcgtgcttgctggtgttaatggtccccgctcggttttactaaccggcagccctgaaccagtagcaagaagggtacaagaactttcggcagagggagttcgggcacaggtcattaatgtgagcatggcggcccattccgcgcaggtggacgatattgcagaagggatgagatcggctctggcgtggtttgccccaggcgggtccgaagttccattttacgccagcctcactgggggagccgtggacacgcgagaactcgttgcggattactggcgacgctcattcagactgcccgttcgtttcgatgaagctataagatcagccctggaagttgggccaggtacattcgtcgaggcctcaccccacccagtcctggcggctgccctacagcagacactggacgcagaggggtcgtcggcagcggtggtccccacattacagcgggggcaaggcggaatgcgtcggttcctcttggcagcggcacaggcattcactggaggagtggccgtcgattggaccgcggcctatgatgatgtggggcctaacccggccctatgtcgatcgtctcggcgcccaagacggaaaacttcgcgaccgtcaccagcttcgacgggaacaagacatagaacttgctgcgaacggctgctcgccgtcgtgaacggcgaaactgccgcattagccggacgtgaagcagatgcagaggcaacctttcgagagcttgggttagattccgttctggcggcccagctcagagctaaagtatccgcggcgataggtcgagaagtcaatattgcactactctatgaccacccaaccccgagagcactcgcagaggcacttgctggcctaccccaggaaattaaacacacgccggcggttcggaccacatccgaagatccaattgccatcgtttcgatggcatgtcgtttaccgggaggagtcaatacgccccaacggctctgggaattactacgggagggtggtgaaaccttgtccgggttcccaacggaccgtggctgggacctagcacggcttcaccaccctgatccggacaaccccggaacgagctacgttgataagggtggatttctcgacgacgcggcgggtttcgacgcagagtttttcggggtttcaccaagggaagctgccgctatggaccctcagcaacgattacttttagagacctcgtgggagctagttgaaaatgcgggcatagatccacatagcctgcgagggacagcgacaggggtgttcctaggagttgcgaagtttggttatggtgaggacacagcagcagcggaagatgttgaaggttattcagttaccggtgttgctcccgctgtggcatctggccgcatatcctacactatgggtttagaaggtccttccatctcggtcgataccgcatgctcaagctcgctagtcgcgcttcatctagccgtagagtccctccgaaagggtgagtcatctatggcggtggtgggtggtgcagccgttatggcgactcctggggtatttgttgatttttcacgccaacgggcgcttgccgcagacggccgttccaaagcgttcggggcaggtgcagatggttttggtttcagcgagggagtcacgctggttctactagagcgtttaagtgaggcgcgtcgtaacggtcatgaagttctagctgtagtgcgcgggtccgcgttaaaccaggacggagcgagcaacggactttcagcaccctccggccctgcgcaacgtagagtaataaggcaagcgctcgaatcgtgtgggcttgaaccgggggatgttgacgcggttgaggcgcatggtactggtacagcactaggtgacccaatagaggccaatgcgctgttggacacttacgggcgagaccgtgatgcggatcgtccactttggttggggtccgttaagagcaatattgggcacactcaagctgcggccggggttacaggactgctgaaggttgtgttagcactgcgcaatggtgagctacctgcaacgttacatgtcgaggaaccaactccacacgtcgattggtcctcaggtggtgtcgcattactggcgggtaatcaaccatggcgaaggggagaaaggaccagaagggcggcagtgagcgcctttggtatctccggtacaaatgctcacgtgatagtggaagaggcgcctcaggaagttcgacccgcccctggccaagggctgtcgccagccgtgtccacgttagttgttgcaggtaaaaccatgcagcgtgtaagtgcgacagctggaatgcttgcagactggatggagggtcctggggccgatgttgcattggcggatgtggcccataccctgaaccatcaccgatcaagacagcccaagttcgggacggttgtagcgcgtgacaggactcaggcgatagctgggctccgtgcattggcggctggtcaacatgctcctggggtcgtcaacccagctgaaggttccccaggaccaggcaccgtgttcgtttttcccggtcaaggttcgcagagggcagggatgggggaggaactcgcggcagcctttcctgtcttcgctcgaatacatcagcaagtttgggacctcctagatgttcccgacctcgacgttaatgaaaccgggtacgcccaaccagcgctgttcgcgcttcaggtcgcgctctttggccttctggagtcgtggggtgttaggccagatgcagtggtagggcactcagttggtgagctggccgcggggtacgtgtccggtctttggtcactagaggacgcctgcacactagtctcagcaagagcgcgcctaatgcaggcactgcctgctggaggggtgatggcggcagtccccgtctccgaggatgaggcgcgggccgtcctgggcgagggagttgaaattgcggctgtgaatggaccctcgtccgttgtgctctcaggggacgaggcggcagtcttacaggccgccgaaggtctaggtaagtggacgcgactgccgaccagccatgcttttcactcagcgagaatggaacccatgctagaagagtttcgggccgtagcagagggtctgacctatcgtacccctcaagtagctatggctgctggggatcaggtgatgacagcagaatattgggtgcggcaggttcgggacacagttcgcttcggggagcaagtagcgtcattcgaggatgcggtgtttgttgagttaggcgctgacagaagtctagcgcgtttggtggacggcatcgccatgctgcacggtgaccacgaagcgcaggccgcggaccataggcaaatcaccgaagcggttgcggatgcttacgtcttaggccaccttccggattttgcggcgctgcggcggcctcacgcacgaaagttggacttaccaacttatcccttcgagcgtagacagtactggttcagagatgcgcgtgagaggccggaacaacccagagataccggcggacctcgcacagaagcagtccgtctgttagaggatggtaggattgaagaattagctgcacttttgggaggggccagtgatgaccaacacacattacaggtgctgactaagttggcggcgcaacataaccaacaacgaacaacccggtcaatcgctgacgacaggtacgaaataaggtgggaccgatcgacttccccactatccggagcagatgttgaccaagcggggagctggatcgtggtgtcagatgacgcagatgccgttcccccgctagtggacttgctggctgcacgtaacgagccccatcaggttgttggtctacccgcttcggacgcagacgaggagaggctcgcagagactctgcgtgcggctgcgactgaagatgctacccttcggatagtccacgttgcggcgctcgaagcaggcgctacccccagcatgcgttcactgctccgcatgcagcaccgaatactaggtggcacgcggcgggtgttcagggcagcggtcgcagcggagttaagaggtcccatttggatagtgacgcggggagcacaaagagtggctgacaccgatacagttgccccgcatcagtcatgcctctggggatttgggagggcagcatcgctggagctgccgcacgtttggggtggcctagcagatttatcagagggcggtgacaatgcggccgatgagtggagtgcgctagtggaccgcattgccgcaccccacggttcagcagttagggaggaccaactggcgctgagagacagggccgtatatacgccaagactggccagacgttctgcgcccccgagcgggactcccctacatctacgaggggatggcacagtgttaataacaggtgggactggtacactaggtaggctattagcgcgtcacctagtaacagagcatggggtgcggcatctcttactagtttcaaggagaggcgccgatgcccctggctcggatgaactgcgcgcagaaatagaggacttaggtgccagcgcggagatcgcagcgtgtgatacagcggatcgcgatgccctatctgccctactagatggtctcccccggccccttacgggtgtcgttcacgccgctggcgtgttagccgatggacttgtcactagcattgacgagcctgcggtggaacaggttctccgagcaaaggtggacgcggcatggaacctacacgaactcacagctaataccgggctatcctttttcgttcttttctcatcagcagcatcggtcctggcaggtccagggcaaggagtttatgcggctgcaaatgaatcgctcaacgcactagctgcgttaaggcgaactaggggtctgccggccaaggctctgggatggggcctgtgggccatcgggcgggcaatcgcttttgcggagcagaccggggacgccatcgctccagaggaaggagcatacgcttttgaaactctgttaaggcataaccgtgcctactcgggatatgcgcccgtcattggatctccctggttgaccgcgttcgcacagcattccccctttgcagaaaaattccaatcactcggacagaatcggtcagggacatcgaaattcttagcggagctagttgacctgcctcgtgaggaatggccggataggctcaggagactactagagttagttaggtcccatgccgccgcggtctccggttacggtagtgcagatcaactgccggaaagaaaagcgttcaaggatttggggtttgattcgctggccgccgttgaactgcgtaaccggctgggaacggctacaggggtacgactgccgtcaaccctagtatttgatcacccaactccgctggccgtcgctgagcacttaagagataggctactgccagtagaacagccttttgtgcactcaccggaagagcggtatcgaccattcgcgttaacggatgttcagcaagcctacctggtcgggcgccagccgggatttgccctgggcggtgtaggctcgcatttcttcgtggaattcgagatcgcagatctcgacatacaccgcctggaaaaagtgtggaaccgtttaattgcacgtcatgatatgttgcgcgctgtggttcgtgacggtcagcaacgtgtactggaacagaccccgccatgggtcataccagcacatattcttcacagtcctgaagaggcattacaggttcgtgatcgtttagctcaccaagtgttgaaccccgaagtctggccggtatttgatctgcaggtgggcttcgttgacggtatgccggcccgtttatggttgtgccttgataacctgttattggacgggctgagcatgcagattcttctctctgaactggagcatggatatcgctacccacagcaactccctcccccgttgccgatcacttttcgcgattatcttcagcaaccggcactccgtaccccaaatcctgactcattggcttggtggcagacgcaactggatgacatcccacctgcgcccgccctcccgctacgttgtctgcctcaagatgttgaaaccccgcgtttcgcgcgtctgtacggcgcaatggattctgctcgttggcgtcgcctgaaacagcgtgcggccgacgcacatctgactccgtcagctgtcctactgagcgtatggtctacagtgctggcagcttggtcggcgcagccggattttactctcaacctgacattattcgaccggcgaccactgcaccctcagattaatcaaatccttggcgattttacctcactgatgttattgtcgtggcatccgggtgagagttggctgcagtccgcgcgtcttctccagcaacgcctttcagaatcgctcaaccaccgtgatgttagcgccattcgcgtcatgcggcagctggcgagaaggcaaaatgtcccggccgtacccatgccggtcgtatttacctctgcgctggggtttgaacaggataacttcctggcccgtcgcaatctactgaaaccggtgtggggtatcagtcagacgccgcaagtttggctggaccatcaggtctatgaatccgagggcgaactgcgttttaactgggatttcgttgcggccctgtttccggacggtcaagtggaacgtcagttcgcgcaatactgcgccttattgaatcgcatggcagaagatgacagctcttggcagttgccgcttgctgatctggtgcccccgttaaaagtgaccgagcggcgagcgagaaggctgcgtccagaacgcgcccagcctcgtattgcagctgataagagttccgttagtctgatctgtgacacttttcgtgaggtggttggggaacccgtggcaccggctgagaactttttcgaagcgggagccacatccctcaatctggttcagctgcatgtccttctccaacgtcacgaatttgcgaccttaacgctactggatttgttcacccatccaagccctgttgcattggctaactatcttgcgggtgtggccctggaagagaaaacgaagcgcgtgcggccggttcggcgaagacagcgtcgcattggagagccgttcccactcgctcctatgcaacacgccatgtgggtagggcggcacgaccaccaacagctcgggggagtagcaggccatctttacgtcgagtttgacggcgcgagagtcgaccccgatcggttgcgcgctgccgccacccgactcgccctacgtcaccctatgttgagggtacagttcctgcctgacggtacacaaaggatccctccagccgcaggctcgcgggactttcccatcagcgttgcggatcttcgtcacgtagctcctgacgttgtcgatcaacggctcgcgggtattagagacgcaaagtctcatcaacagcttgatggagctgtcttcgagttggctctcactctcctgccaggtgaaaggacgaggctgcacgtcgacctggatatgcaagctgctgacgccatgagctacaggatcctgctggcggacttggccgcactatacgacgggagagagcccccagcactcggttacacgtatagagagtaccgccaggctattgaggccgaggaaacattaccgcaacctgttcgcgacgccgatagggactggtgggcacaaagaataccacagcttccagacccgcccgcactaccgacgcgtgccggtggtgagagagatcgccggcgctcgaccagaagatggcactggttagacccacaaacaagggacgccctcttcgcacgagcacgagctcgtggcatcacacctgcaatgacacttgcggccgcgtttgcaaatgtcctcgcgagatggtccgcctcttcccggttcttactcaatttgccccttttctcgcgccaagcgttgcatccggacgtagacctcttggtaggtgacttcacatcgtcgctgctgttagatgttgacctaggagatacagtgtctaatcttgctcggaagaaccaactgacttttacggaggactgggaacaccggcattggagcggagtagagttgctgcgagaactcaaaaggcaacagcgttacccacacggagcgcccgtggtgttcacttctaatcttgggcgcagtttatattcttctcgggcggagtcccccttgggagagcctgaatggggaatttcgcaaacaccacaggtttggatcgaccatttagcatttgagcaccatggggaagtatggctccaatgggactcgaacgacgccctcttcccacctgctttagtcgagactctgtttgacgcgtactgtcaattgataaaccagctgtgcgacgatgaatccgcatggcaaaagcccttcgcggacatgatgccggcgagtcagcgtgctattcgtgagcgggtgaacgctaccggcgcaccgatcccggagggcctcttacacgaagggatttttcggatcgctcttcaacagcctcaggcgctcgcggtaacggacatgcggtaccaatggaatagttatcgagagatgcgggaacaggtcgtcgctttggcaaatctactccgagagcgcggggtcaagccaggggactcagtcgctgtagcgcttcctcggtcagtcttcctaaccttggctctccacgcgatcgtagaggcgggtgcggcgtggcttcccctcgacacgggctatccggacgatcggttgaagatgatgctagaggatgcacgaccctctctgttaatcacaaccgacgatcaactccccaggttctcagacgtccctaatcttaccagtctatgttacaacgcgcccctcactccacaaggcagcgctcctttacaacttagtcagccgcaccataccgcttatatcatttttacgtccggttccacgggcaggccgaagggtgtaatggtgggccaaactgcaatagtgaatagactattgtggatgcaaaaccactacccgcttaccggggaggacgtagtggctcaaaagactccctgctctttcgatgtcagcgtgtgggagttcttttggccttttatagccggcgctaaattggttatggcggagccggaagctcaccgagaccctttggccatgcaacagttctttgcagagtatggagtcacaacgacgcatttcgtcccatcgatgttagccgcgttcgtagcatcattgacgccacaaactgcgagacagtcatgtgccacacttaagcaagtcttctgctctggtgaggcccttcctgcggacctatgtcgggaatggcaacagcttactggagcccccttgcacaatctttacgggccgactgaggccgcagttgacgtatcgtggtatccagcgttcggggaggagctagcccaagtgcgagggtctagtgttccaattggatacccggtgtggaacacagggttaaggatcctcgacgccatgatgcatccggtaccaccaggtgtcgctggggatttgtacctgactggcattcaactggcacagggttatctagggcggcctgacttaacagctagccgattcatagcagatccattcgctcccggagagcggatgtaccgaacaggcgacgtggcacgctggttagataatggcgctgtcgagtatcttgggcggtcagacgatcagttaaagatacgtggacaacggattgagcttggtgaaatagaccgagttatgcaggcactaccagatgtcgagcaagccgtagcctcttgtgccattgcgcgagaagacattcccgggaacaagcacttggttgcgtacatagtgccgcaagaggagcagacctgcacagagcggtcacgttcaactctcacagtttccttcgtccgttctttcttaaaggagaaactaccagaatatatggtaccgtccgcgatcgtgatattagacgctctgccactcacgccaaatggaaagttggatagaagagctctgcctgctcctgacttgcactcgcaactcctggataaatacgttgctcccagaaacccaatagagactattatcgcggcagcattctcttcattgcttggatgcgacgtccaagatgcggacgcagatttctttgcgctcgggggccatagtctattggccatgaagctcgcagcgcaattgtcgagacaggtagcacggcaagtaacgcccgggcaagtcatggtcgcctcgacagtcgcgaaactcgcgaccattatcgacgctgagacatccggggaagataaccctatccccctatgtcaaggcgatggggaggagatgagcacatggctacgtcgttttggacccccagtcgaacatcgggccaggctagtgtgtttcccccacgcaggcgcagcggcggattcatacttagacctagcaagagcgttagcaccagagatcgatgttcatgctgttcaataccccggcaggcaagacagaagggacgaggagccattaggaaccgcaggtgaaattgcagatgaagtggcagcggtgctacgtgcgtcgggaggggatgggccttttgcacttttcggccacagtatgggcgccctcatcgcgtacgagacagcaaggcgattagagagggaaccgggagggggacccttacgtttattcgtgagcggacaaacagcgccacgtgtccatgaacgaagaactgatctgcccggtgacgatggactcgtggacgagcttaggcgacttggcacctccgaggcagcgctcgcagacgaagccctgctggctatgtctctcccggtgctcagggcggattatagggtgttaagatcctacgcttgggcggatggtcccccactacgcgccggtataactgccctctgcggtgatgcagacccactaactgcaacaggggatgcggaacgctggttacaacattccgtgattccgggtcggacacggacatttcccggtgggcatttttatttaggggaacaagtgaccgaggtggcaggggctgtccgtagagatttactgagagcagggttagcgggttga

SEQ ID NO: 26 - DNA, 12939 bp, Artificial Sequence
  MOH
atgaacccaccctgcgggccagtccgtgcgaattgcgtacacatatccatagatttccccatgccagtttccaaagtttccggtcctcgatcaaggacaaccagccggaggacacccgtccggattggggccgtggtggtggcaagctcgactagcgaactccttgatgggctcgcagcggttgctgatggtaggccacacgccagcgtagttaggggcgttgcgcgcccttctgcgccggttgtattcgttttcccaggtcaaggagcgcaatgggctgggatggcgggggagctactcggggagagtcgggtctttgcagccgctatggacgcctgcgcgagggcgttcgaacctgtaaccgattggacattggcccaagttttggattcaccagagcaatcccggcgtgtagaggtcgtccaacccgccctttttgcagtgcagacctctttggctgcactctggagatctttcggcgtgacacccgacgcagtcgtagggcactctatcggggagcttgcggcggcgcacgtctgtggggcagccggggcagctgacgcggcaagagctgccgcactgtggtcacgagaaatgatcccactagtggggaacggtgacatggcggcggttgcactctcggcagatgagattgaaccacggatcgcccgttgggacgacgacgtcgtgcttgctggtgttaatggtccccgctcggttttactaaccggcagccctgaaccagtagcaagaagggtacaagaactttcggcagagggagttcgggcacaggtcattaatgtgagcatggcggcccattccgcgcaggtggacgatattgcagaagggatgagatcggctctggcgtggtttgccccaggcgggtccgaagttccattttacgccagcctcactgggggagccgtggacacgcgagaactcgttgcggattactggcgacgctcattcagactgcccgttcgtttcgatgaagctataagatcagccctggaagttgggccaggtacattcgtcgaggcctcaccccacccagtcctggcggctgccctacagcagacactggacgcagaggggtcgtcggcagcggtggtccccacattacagcgggggcaaggcggaatgcgtcggttcctcttggcagcggcacaggcattcactggaggagtggccgtcgattggaccgcggcctatgatgatgtggggcctaacccggccctatgtcgatcgtctcggcgcccaagacggaaaacttcgcgaccgtcaccagcttcgacgggaacaagacatagaacttgctgcgaacggctgctcgccgtcgtgaacggcgaaactgccgcattagccggacgtgaagcagatgcagaggcaacctttcgagagcttgggttagattccgttctggcggcccagctcagagctaaagtatccgcggcgataggtcgagaagtcaatattgcactactctatgaccacccaaccccgagagcactcgcagaggcacttgctggcctaccccaggaaattaaacacacgccggcggttcggaccacatccgaagatccaattgccatcgtttcgatggcatgtcgtttaccgggaggagtcaatacgccccaacggctctgggaattactacgggagggtggtgaaaccttgtccgggttcccaacggaccgtggctgggacctagcacggcttcaccaccctgatccggacaaccccggaacgagctacgttgataagggtggatttctcgacgacgcggcgggtttcgacgcagagtttttcggggtttcaccaagggaagctgccgctatggaccctcagcaacgattacttttagagacctcgtgggagctagttgaaaatgcgggcatagatccacatagcctgcgagggacagcgacaggggtgttcctaggagttgcgaagtttggttatggtgaggacacagcagcagcggaagatgttgaaggttattcagttaccggtgttgctcccgctgtggcatctggccgcatatcctacactatgggtttagaaggtccttccatctcggtcgataccgcatgctcaagctcgctagtcgcgcttcatctagccgtagagtccctccgaaagggtgagtcatctatggcggtggtgggtggtgcagccgttatggcgactcctggggtatttgttgatttttcacgccaacgggcgcttgccgcagacggccgttccaaagcgttcggggcaggtgcagatggttttggtttcagcgagggagtcacgctggttctactagagcgtttaagtgaggcgcgtcgtaacggtcatgaagttctagctgtagtgcgcgggtccgcgttaaaccaggacggagcgagcaacggactttcagcaccctccggccctgcgcaacgtagagtaataaggcaagcgctcgaatcgtgtgggcttgaaccgggggatgttgacgcggttgaggcgcatggtactggtacagcactaggtgacccaatagaggccaatgcgctgttggacacttacgggcgagaccgtgatgcggatcgtccactttggttggggtccgttaagagcaatattgggcacactcaagctgcggccggggttacaggactgctgaaggttgtgttagcactgcgcaatggtgagctacctgcaacgttacatgtcgaggaaccaactccacacgtcgattggtcctcaggtggtgtcgcattactggcgggtaatcaaccatggcgaaggggagaaaggaccagaagggcggcagtgagcgcctttggtatctccggtacaaatgctcacgtgatagtggaagaggcgcctcaggaagttcgacccgcccctggccaagggctgtcgccagccgtgtccacgttagttgttgcaggtaaaaccatgcagcgtgtaagtgcgacagctggaatgcttgcagactggatggagggtcctggggccgatgttgcattggcggatgtggcccataccctgaaccatcaccgatcaagacagcccaagttcgggacggttgtagcgcgtgacaggactcaggcgatagctgggctccgtgcattggcggctggtcaacatgctcctggggtcgtcaacccagctgaaggttccccaggaccaggcaccgtgttcgtttttcccggtcaaggttcgcagagggcagggatgggggaggaactcgcggcagcctttcctgtcttcgctcgaatacatcagcaagtttgggacctcctagatgttcccgacctcgacgttaatgaaaccgggtacgcccaaccagcgctgttcgcgcttcaggtcgcgctctttggccttctggagtcgtggggtgttaggccagatgcagtggtagggcactcagttggtgagctggccgcggggtacgtgtccggtctttggtcactagaggacgcctgcacactagtctcagcaagagcgcgcctaatgcaggcactgcctgctggaggggtgatggcggcagtccccgtctccgaggatgaggcgcgggccgtcctgggcgagggagttgaaattgcggctgtgaatggaccctcgtccgttgtgctctcaggggacgaggcggcagtcttacaggccgccgaaggtctaggtaagtggacgcgactgccgaccagccatgcttttcactcagcgagaatggaacccatgctagaagagtttcgggccgtagcagagggtctgacctatcgtacccctcaagtagctatggctgctggggatcaggtgatgacagcagaatattgggtgcggcaggttcgggacacagttcgcttcggggagcaagtagcgtcattcgaggatgcggtgtttgttgagttaggcgctgacagaagtctagcgcgtttggtggacggcatcgccatgctgcacggtgaccacgaagcgcaggccgcggaccataggcaaatcaccgaagcggttgcggatgcttacgtcttaggccaccttccggattttgcggcgctgcggcggcctcacgcacgaaagttggacttaccaacttatcccttcgagcgtagacagtactggttcagagatgcgcgtgagaggccggaacaacccagagataccggcggacctcgcacagaagcagtccgtctgttagaggatggtaggattgaagaattagctgcacttttgggaggggccagtgatgaccaacacacattacaggtgctgactaagttggcggcgcaacataaccaacaacgaacaacccggtcaatcgctgacgacaggtacgaaataaggtgggaccgatcgacttccccactatccggagcagatgttgaccaagcggggagctggatcgtggtgtcagatgacgcagatgccgttcccccgctagtggacttgctggctgcacgtaacgagccccatcaggttgttggtctacccgcttcggacgcagacgaggagaggctcgcagagactctgcgtgcggctgcgactgaagatgctacccttcggatagtccacgttgcggcgctcgaagcaggcgctacccccagcatgcgttcactgctccgcatgcagcaccgaatactaggtggcacgcggcgggtgttcagggcagcggtcgcagcggagttaagaggtcccatttggatagtgacgcggggagcacaaagagtggctgacaccgatacagttgccccgcatcagtcatgcctctggggatttgggagggcagcatcgctggagctgccgcacgtttggggtggcctagcagatttatcagagggcggtgacaatgcggccgatgagtggagtgcgctagtggaccgcattgccgcaccccacggttcagcagttagggaggaccaactggcgctgagagacagggccgtatatacgccaagactggccagacgttctgcgcccccgagcgggactcccctacatctacgaggggatggcacagtgttaataacaggtgggactggtacactaggtaggctattagcgcgtcacctagtaacagagcatggggtgcggcatctcttactagtttcaaggagaggcgccgatgcccctggctcggatgaactgcgcgcagaaatagaggacttaggtgccagcgcggagatcgcagcgtgtgatacagcggatcgcgatgccctatctgccctactagatggtctcccccggccccttacgggtgtcgttcacgccgctggcgtgttagccgatggacttgtcactagcattgacgagcctgcggtggaacaggttctccgagcaaaggtggacgcggcatggaacctacacgaactcacagctaataccgggctatcctttttcgttcttttctcatcagcagcatcggtcctggcaggtccagggcaaggagtttatgcggctgcaaatgaatcgctcaacgcactagctgcgttaaggcgaactaggggtctgccggccaaggctctgggatggggcctgtgggccatcgggcgggcaatcgcttttgcggagcagaccggggacgccatcgctccagaggaaggagcatacgcttttgaaactctgttaaggcataaccgtgcctactcgggatatgcgcccgtcattggatctccctggttgaccgcgttcgcacagcattccccctttgcagaaaaattccaatcactcggacagaatcggtcagggacatcgaaattcttagcggagctagttgacctgcctcgtgaggaatggccggataggctcaggagactactagagttagttaggtcccatgccgccgcggtctccggttacggtagtgcagatcaactgccggaaagaaaagcgttcaaggatttggggtttgattcgctggccgccgttgaactgcgtaaccggctgggaacggctacaggggtacgactgccgtcaaccctagtatttgatcacccaactccgctggccgtcgctgagcacttaagagataggctacctggaattggggcgctagttcccgctcccgtggtaatcgcagcaggccgtacggaggaaccaattgccatagtatccatggcttgccggttacccggtggtgtgaataccccacagagactatgggaattattacgtgaagggggagaaaccctcagtggcttccctaccgaccgagggtgggacctcgcgaggttgcatcacccagacccagacaaccccggtacgtcatacgttgataaagggggattcctggacgatgcggcagggtttgacgcagaatttttcggtgtgagccccagagaagcagcggctatggacccgcagcagagattactcctcgaaaccagctgggagttagtcgagaatgcagggattgatccacatagcctaagggggaccgccactggtgtcttcctcggcgttgccaagtttgggtatggcgaggatacggcagctgccgaagacgtcgaggggtactctgtcactggtgtagccccggcagtggcgtcgggcagaattagttacacgatggggttggaagggccgtctatttcggttgataccgcctgttcctccagtctggttgcactccaccttgcagtcgagtcgctccggaaaggagaaagcagtatggccgtggtcgggggagcggcggtgatggccacaccgggtgtgtttgtggatttttcccgacagagagccttggccgcggatgggcgttcaaaggcgttcggagcaggtgcagacgggtttggatttagcgaaggtgtgacactggttctcctagaaagattaagtgaagcccggcgtaacggccatgaggtgctggcagttgttagaggttccgcattaaaccaggacggggcttcgaacgggctgagcgccccctcgggcccggcacagagaagagtgatacgccaagcactcgaatcgtgtggcctagaaccaggtgacgttgacgcggtggaagcgcacgggacaggaactgcgttaggggacccgatagaagcaaacgccttgctggacacttatggtagagatcgtgatgcggatcgacccctctggttaggaagtgttaagtcaaatataggacacactcaggcagcggcgggagtaactgggctgctcaaagtagtcctagccttacgcaatggggaactacccgccaccctacatgtcgaggaaccgacaccgcatgtggattggtcgagcgggggagttgctctcttggcgggtaatcagccgtggcgaagaggtgaacgaacccgtagagccgccgtgtccgcattcgggatcagtggtacgaacgcgcacgtgattgtggaagaagctccacaagaggtgagaccagcgcccggtcaaggactctcgcccgcggtgtcaaccttggtagtggcgggtaaaactatgcagcgtgtttcggcaaccgccggtatgctcgcagattggatggaaggcccaggtgcagatgtggcgctggcggacgtggcgcacacgttaaatcatcaccgttcacggcaaccaaagttcggtacggtggtggccagggaccggacacaggcaatcgccggactaagagcgctggcggcgggtcagcacgccccaggggttgttaaccctgctgaaggaagtccaggtccagggacggtgttcgtgtttcctggccaggggtcccagcgtgcaggcatgggggaggagttggctgcggctttccccgtgtttgccagaatccaccagcaagtgtgggatttactcgatgttcctgatctcgacgttaacgaaacggggtacgcacaaccagcactcttcgcactccaagtggcgctgtttgggctcctcgaatcatggggagtacggccggatgccgtggtcgggcatagtgtaggggaattagcggcagggtacgtttccgggctttggagtcttgaggatgcttgcacgctcgtgtcggcgagagcccgtctaatgcaagccttaccggcaggtggtgttatggcggcagttccagtgtccgaagacgaagcacgggctgtgttgggggaaggagtcgaaatagctgcggtcaacggtccgtcgagcgtggttctaagcggtgatgaagcagcagtgctccaggccgcggaagggttaggcaagtggacgcgattaccgacctcgcatgcattccattctgctcgtatggaaccaatgctggaagagtttagagcagtggcggaaggtctaacatacaggactccccaggtggcaatggccgccggagaccaggttatgaccgctgaatactgggtgcgtcaggttagggatacagttcgttttggcgagcaagttgcctcgttcgaggatgctgtattcgtggaattgggagcagatcgctctcttgcacggctagtcgatggtatcgcgatgttgcacggggatcatgaggcacaggctggtatgcggagagaacaacccttgcccttaggtttacgaagattgctaaccgacctgcataacgctggtgctgccgtcgattttagtgttttgtgcccacaaggtcgtctggttgacgcaccgttaccagcctggtcacaccggtttctcttctatgaccgggaaggagtggacaatagatcaccagggggaagcacagtggcggtccacccgcttttactagccgcggtggatgtgccgggccacggtggagcggttttcacgggtagactctcgactgacgagcaaccgtggttagcggagcacgttgtcgggggaagaaccctagttcctggttctgttttagtcgatctagccttagcggcaggcgaagacgtagggctaccggtgttagaagaattagtattgcagaggccgctggtgcttgccggcgcgggagcactcctacggatgtcggtcggggcaccagacgagagcggtagaagaactatcgatgttcacgcagctgaagacgtcgccgatttagcagatgcccaatggtcccagcacgccaccgggactttagcccaaggggtagcggcggggcccagggacacagagcaatggcccccagaggatgccgtccggattccattagacgaccattatgatggtctcgcggaacagggttatgagtacggtccgtcgtttcaggcgctagtggcctacgtggcggaggatgcgactgcgacaatgttagcggaagtcgcgcttccgggcagcattagatcgcaacaaggtctatacgccatccatcccgcactgctggacgcttgttttcaatctgtcggagcccacccagacagtcaatccgtcgggtcaggtctactcgtacccctcggtgttcggagagttcgtgcgtacgcacccgtaaggaccgcccgttattgttacacccgcgtcacgaaagttgaactagctggggttgaggccgacatcgacgttctggatgctcacggcacagtgcttctagccgtgtgcggtcttcgtatcgggaccggagtgagcgagagggacaaacacaacagagttctcaatgagcgcctactcaccatcgaatggcatcagcgtgaactaccagaaatggacccctcgggtgccgggaagtggctcctaatctcggactgtgcagcatccgatgtcaccgctacacgactggctgatgccttccgggagcacagcgctgcgtgcactaccatgcggtggccacttcacgatgatcaactagcagccgccgaccaactccgggaccaggtgggttcagatgagttttctggcgtggtagtactaacagggccaaacacagggacccctcatcagggttccgcagaccgtggcgccgagtacgttaggcggttagttggaatcgctcgtgaacttagcgatcttcccggagcggttccccgtatgtatgtcgtcacaaggggagcgcagagagtccttgccgatgattgtgttaatttagaacagggagggctcagaggtctgctgaggaccatcggtgctgagcacccacatctccgcgccacccaaattgatgttgatgagcagacaggagtagagcagctggcgcgacaactcctagctacatcggaggaagacgagacagcctggagggacaacgaatggtacgttgcgaggttatgccccacacccctgaggccacaggaacgtaggacaatagtggcggaccatcaacagtctggtatgcggttacaaatacgtacgcccggtgcaatcgatagtgtggcctttgaacccgcacccgatgtagagcaacccttacgggcgggtgaagttcgggttgacgttagagcaaccggtgttaatttccgtgacgttctactcgctctcgggatgtatccccagaaagctgacatggggacagaagcagctggtgttgtaacagcagtgggacctgatgtcgatgcgtttgcgcctggtgatagagttctagggctattccaaggggcatttgctccaattgcggtgactgaccatcgtttactggcacgggtgccagacgggtggtcagatgccgatgcggcggcggtgccaatagcttacacgacagcacattatgcgctgcacgacctggcggggttgcgggcggggcaatctgtcctgatacacgcggcagcgggtggtgttggtatggccgctgttgcactggcacggagggccggcgcagaagttctggctaccgcaggacctgcaaaacacggtacgctacgggcattagggctagatgatgaacacatcgcttcgagtcgggagaccgggttcgcgcgtaagttccgagagcggactgggggacgaggagtggacgtcgttctaaacagcttgaccggcgaactattagacgagtccgcggatctcctcgcggaggacggagtcttcgtggaaatgggaaagactgatctgcgcgatgcaggggactttcgtgggcgctacgccccgtttgatctaggggaagcaggcgatgacaggctcggggaaattctacgtgaggtggtgggactgctcggtgcaggggaactcgaccgactccctgttagcgcgtgggaattggggataccccagacggggaagtcgttagtgacgctgccacccgaacaagcgcaagttttcagaccagacggcactgtattgatcaccgggggaacgggaacgttaggtcggctgctggcccgtcatctggttacagagcacggggtgcgtcacctgctgctagtgtcgaggagaggagcagatgcccctggatcggacgagctgagggccgaaatcgaggatctcggagcatcagcggaaattgcagcatgtgatacagccgatcgagacgctctcagcgcgttgctagatggactgccgaggccactgaccggagtagttcacgccgcgggagtcctcgctgacggtctggttacatccatcgacgagcccgcagtcgaacaagttctccgtgcaaaagttgatgcggcctggaacctgcacgagctaactgcgaacaccggtctcagctttttcgtgctgttctcgtcagccgcaagtgtgttagcggggccggggcagggagtatatgcggcagcgaacgaatctttaaacgctctggccgctctgcgtaggactaggggtttacccgcaaaagcattgggatggggattatgggcgatagggcgtgcaatagcatttgccgagcagaccggtgacgcaatcgccccggaggaaggcgcgtacgccttcgagacactactcagacataacagggcgtactcgggttacgctcccgtgatagggtcaccatggctgactgcgttcgcccaacattcgccctttgcggagaagttccagtccctggggcaaaatagatccgggacgtctaagtttctggcagaattagtcgatctgccaagagaagaatggccagatcggttacgtcgtctattagaactggtgaggtctcatgctgccgcagtttcggggtatggatcggcagaccaattaccagaaagaaaagcattcaaagacctcggattcgattcactggcagcagtcgaactaagaaatcgtctagggaccgcgacaggcgtccggctgcccagtactctggtgttcgaccacccaaccccacttgcggttgcggaacatctacgtgatcgtctaacatccggggaagataaccctatccccctatgtcaaggcgatggggaggagatgagcacatggctacgtcgttttggacccccagtcgaacatcgggccaggctagtgtgtttcccccacgcaggcgcagcggcggattcatacttagacctagcaagagcgttagcaccagagatcgatgttcatgctgttcaataccccggcaggcaagacagaagggacgaggagccattaggaaccgcaggtgaaattgcagatgaagtggcagcggtgctacgtgcgtcgggaggggatgggccttttgcacttttcggccacagtatgggcgccctcatcgcgtacgagacagcaaggcgattagagagggaaccgggagggggacccttacgtttattcgtgagcggacaaacagcgccacgtgtccatgaacgaagaactgatctgcccggtgacgatggactcgtggacgagcttaggcgacttggcacctccgaggcagcgctcgcagacgaagccctgctggctatgtctctcccggtgctcagggcggattatagggtgttaagatcctacgcttgggcggatggtcccccactacgcgccggtataactgccctctgcggtgatgcagacccactaactgcaacaggggatgcggaacgctggttacaacattccgtgattccgggtcggacacggacatttcccggtgggcatttttatttaggggaacaagtgaccgaggtggcaggggctgtccgtagagatttactgagagcagggttagcgggttga

SEQ ID NO: 27 - DNA, 11286 bp, Artificial Sequence
  MOO
atgaacccaccctgcgggccagtccgtgcgaattgcgtacacatatccatagatttccccatgccagtttccaaagtttccggtcctcgatcaaggacaaccagccggaggacacccgtccggattggggccgtggtggtggcaagctcgactagcgaactccttgatgggctcgcagcggttgctgatggtaggccacacgccagcgtagttaggggcgttgcgcgcccttctgcgccggttgtattcgttttcccaggtcaaggagcgcaatgggctgggatggcgggggagctactcggggagagtcgggtctttgcagccgctatggacgcctgcgcgagggcgttcgaacctgtaaccgattggacattggcccaagttttggattcaccagagcaatcccggcgtgtagaggtcgtccaacccgccctttttgcagtgcagacctctttggctgcactctggagatctttcggcgtgacacccgacgcagtcgtagggcactctatcggggagcttgcggcggcgcacgtctgtggggcagccggggcagctgacgcggcaagagctgccgcactgtggtcacgagaaatgatcccactagtggggaacggtgacatggcggcggttgcactctcggcagatgagattgaaccacggatcgcccgttgggacgacgacgtcgtgcttgctggtgttaatggtccccgctcggttttactaaccggcagccctgaaccagtagcaagaagggtacaagaactttcggcagagggagttcgggcacaggtcattaatgtgagcatggcggcccattccgcgcaggtggacgatattgcagaagggatgagatcggctctggcgtggtttgccccaggcgggtccgaagttccattttacgccagcctcactgggggagccgtggacacgcgagaactcgttgcggattactggcgacgctcattcagactgcccgttcgtttcgatgaagctataagatcagccctggaagttgggccaggtacattcgtcgaggcctcaccccacccagtcctggcggctgccctacagcagacactggacgcagaggggtcgtcggcagcggtggtccccacattacagcgggggcaaggcggaatgcgtcggttcctcttggcagcggcacaggcattcactggaggagtggccgtcgattggaccgcggcctatgatgatgtggggcctaacccggccctatgtcgatcgtctcggcgcccaagacggaaaacttcgcgaccgtcaccagcttcgacgggaacaagacatagaacttgctgcgaacggctgctcgccgtcgtgaacggcgaaactgccgcattagccggacgtgaagcagatgcagaggcaacctttcgagagcttgggttagattccgttctggcggcccagctcagagctaaagtatccgcggcgataggtcgagaagtcaatattgcactactctatgaccacccaaccccgagagcactcgcagaggcacttgctggcctaccccaggaaattaaacacacgccggcggttcggaccacatccgaagatccaattgccatcgtttcgatggcatgtcgtttaccgggaggagtcaatacgccccaacggctctgggaattactacgggagggtggtgaaaccttgtccgggttcccaacggaccgtggctgggacctagcacggcttcaccaccctgatccggacaaccccggaacgagctacgttgataagggtggatttctcgacgacgcggcgggtttcgacgcagagtttttcggggtttcaccaagggaagctgccgctatggaccctcagcaacgattacttttagagacctcgtgggagctagttgaaaatgcgggcatagatccacatagcctgcgagggacagcgacaggggtgttcctaggagttgcgaagtttggttatggtgaggacacagcagcagcggaagatgttgaaggttattcagttaccggtgttgctcccgctgtggcatctggccgcatatcctacactatgggtttagaaggtccttccatctcggtcgataccgcatgctcaagctcgctagtcgcgcttcatctagccgtagagtccctccgaaagggtgagtcatctatggcggtggtgggtggtgcagccgttatggcgactcctggggtatttgttgatttttcacgccaacgggcgcttgccgcagacggccgttccaaagcgttcggggcaggtgcagatggttttggtttcagcgagggagtcacgctggttctactagagcgtttaagtgaggcgcgtcgtaacggtcatgaagttctagctgtagtgcgcgggtccgcgttaaaccaggacggagcgagcaacggactttcagcaccctccggccctgcgcaacgtagagtaataaggcaagcgctcgaatcgtgtgggcttgaaccgggggatgttgacgcggttgaggcgcatggtactggtacagcactaggtgacccaatagaggccaatgcgctgttggacacttacgggcgagaccgtgatgcggatcgtccactttggttggggtccgttaagagcaatattgggcacactcaagctgcggccggggttacaggactgctgaaggttgtgttagcactgcgcaatggtgagctacctgcaacgttacatgtcgaggaaccaactccacacgtcgattggtcctcaggtggtgtcgcattactggcgggtaatcaaccatggcgaaggggagaaaggaccagaagggcggcagtgagcgcctttggtatctccggtacaaatgctcacgtgatagtggaagaggcgcctcaggaagttcgacccgcccctggccaagggctgtcgccagccgtgtccacgttagttgttgcaggtaaaaccatgcagcgtgtaagtgcgacagctggaatgcttgcagactggatggagggtcctggggccgatgttgcattggcggatgtggcccataccctgaaccatcaccgatcaagacagcccaagttcgggacggttgtagcgcgtgacaggactcaggcgatagctgggctccgtgcattggcggctggtcaacatgctcctggggtcgtcaacccagctgaaggttccccaggaccaggcaccgtgttcgtttttcccggtcaaggttcgcagagggcagggatgggggaggaactcgcggcagcctttcctgtcttcgctcgaatacatcagcaagtttgggacctcctagatgttcccgacctcgacgttaatgaaaccgggtacgcccaaccagcgctgttcgcgcttcaggtcgcgctctttggccttctggagtcgtggggtgttaggccagatgcagtggtagggcactcagttggtgagctggccgcggggtacgtgtccggtctttggtcactagaggacgcctgcacactagtctcagcaagagcgcgcctaatgcaggcactgcctgctggaggggtgatggcggcagtccccgtctccgaggatgaggcgcgggccgtcctgggcgagggagttgaaattgcggctgtgaatggaccctcgtccgttgtgctctcaggggacgaggcggcagtcttacaggccgccgaaggtctaggtaagtggacgcgactgccgaccagccatgcttttcactcagcgagaatggaacccatgctagaagagtttcgggccgtagcagagggtctgacctatcgtacccctcaagtagctatggctgctggggatcaggtgatgacagcagaatattgggtgcggcaggttcgggacacagttcgcttcggggagcaagtagcgtcattcgaggatgcggtgtttgttgagttaggcgctgacagaagtctagcgcgtttggtggacggcatcgccatgctgcacggtgaccacgaagcgcaggccgcggaccataggcaaatcaccgaagcggttgcggatgcttacgtcttaggccaccttccggattttgcggcgctgcggcggcctcacgcacgaaagttggacttaccaacttatcccttcgagcgtagacagtactggttcagagatgcgcgtgagaggccggaacaacccagagataccggcggacctcgcacagaagcagtccgtctgttagaggatggtaggattgaagaattagctgcacttttgggaggggccagtgatgaccaacacacattacaggtgctgactaagttggcggcgcaacataaccaacaacgaacaacccggtcaatcgctgacgacaggtacgaaataaggtgggaccgatcgacttccccactatccggagcagatgttgaccaagcggggagctggatcgtggtgtcagatgacgcagatgccgttcccccgctagtggacttgctggctgcacgtaacgagccccatcaggttgttggtctacccgcttcggacgcagacgaggagaggctcgcagagactctgcgtgcggctgcgactgaagatgctacccttcggatagtccacgttgcggcgctcgaagcaggcgctacccccagcatgcgttcactgctccgcatgcagcaccgaatactaggtggcacgcggcgggtgttcagggcagcggtcgcagcggagttaagaggtcccatttggatagtgacgcggggagcacaaagagtggctgacaccgatacagttgccccgcatcagtcatgcctctggggatttgggagggcagcatcgctggagctgccgcacgtttggggtggcctagcagatttatcagagggcggtgacaatgcggccgatgagtggagtgcgctagtggaccgcattgccgcaccccacggttcagcagttagggaggaccaactggcgctgagagacagggccgtatatacgccaagactggccagacgttctgcgcccccgagcgggactcccctacatctacgaggggatggcacagtgttaataacaggtgggactggtacactaggtaggctattagcgcgtcacctagtaacagagcatggggtgcggcatctcttactagtttcaaggagaggcgccgatgcccctggctcggatgaactgcgcgcagaaatagaggacttaggtgccagcgcggagatcgcagcgtgtgatacagcggatcgcgatgccctatctgccctactagatggtctcccccggccccttacgggtgtcgttcacgccgctggcgtgttagccgatggacttgtcactagcattgacgagcctgcggtggaacaggttctccgagcaaaggtggacgcggcatggaacctacacgaactcacagctaataccgggctatcctttttcgttcttttctcatcagcagcatcggtcctggcaggtccagggcaaggagtttatgcggctgcaaatgaatcgctcaacgcactagctgcgttaaggcgaactaggggtctgccggccaaggctctgggatggggcctgtgggccatcgggcgggcaatcgcttttgcggagcagaccggggacgccatcgctccagaggaaggagcatacgcttttgaaactctgttaaggcataaccgtgcctactcgggatatgcgcccgtcattggatctccctggttgaccgcgttcgcacagcattccccctttgcagaaaaattccaatcactcggacagaatcggtcagggacatcgaaattcttagcggagctagttgacctgcctcgtgaggaatggccggataggctcaggagactactagagttagttaggtcccatgccgccgcggtctccggttacggtagtgcagatcaactgccggaaagaaaagcgttcaaggatttggggtttgattcgctggccgccgttgaactgcgtaaccggctgggaacggctacaggggtacgactgccgtcaaccctagtatttgatcacccaactccgctggccgtcgctgagcacttaagagataggctacctggaattggggcgctagttcccgctcccgtggtaatcgcagcaggccgtacggaggaaccaattgccatcgtttcgatggcatgtcgtttaccgggaggagtcaatacgccccaacggctctgggaattactacgggagggtggtgaaaccttgtccgggttcccaacggaccgtggctgggacctagcacggcttcaccaccctgatccggacaaccccggaacgagctacgttgataagggtggatttctcgacgacgcggcgggtttcgacgcagagtttttcggggtttcaccaagggaagctgccgctatggaccctcagcaacgattacttttagagacctcgtgggagctagttgaaaatgcgggcatagatccacatagcctgcgagggacagcgacaggggtgttcctaggagttgcgaagtttggttatggtgaggacacagcagcagcggaagatgttgaaggttattcagttaccggtgttgctcccgctgtggcatctggccgcatatcctacactatgggtttagaaggtccttccatctcggtcgataccgcatgctcaagctcgctagtcgcgcttcatctagccgtagagtccctccgaaagggtgagtcatctatggcggtggtgggtggtgcagccgttatggcgactcctggggtatttgttgatttttcacgccaacgggcgcttgccgcagacggccgttccaaagcgttcggggcaggtgcagatggttttggtttcagcgagggagtcacgctggttctactagagcgtttaagtgaggcgcgtcgtaacggtcatgaagttctagctgtagtgcgcgggtccgcgttaaaccaggacggagcgagcaacggactttcagcaccctccggccctgcgcaacgtagagtaataaggcaagcgctcgaatcgtgtgggcttgaaccgggggatgttgacgcggttgaggcgcatggtactggtacagcactaggtgacccaatagaggccaatgcgctgttggacacttacgggcgagaccgtgatgcggatcgtccactttggttggggtccgttaagagcaatattgggcacactcaagctgcggccggggttacaggactgctgaaggttgtgttagcactgcgcaatggtgagctacctgcaacgttacatgtcgaggaaccaactccacacgtcgattggtcctcaggtggtgtcgcattactggcgggtaatcaaccatggcgaaggggagaaaggaccagaagggcggcagtgagcgcctttggtatctccggtacaaatgctcacgtgatagtggaagaggcgcctcaggaagttcgacccgcccctggccaagggctgtcgccagccgtgtccacgttagttgttgcaggtaaaaccatgcagcgtgtaagtgcgacagctggaatgcttgcagactggatggagggtcctggggccgatgttgcattggcggatgtggcccataccctgaaccatcaccgatcaagacagcccaagttcgggacggttgtagcgcgtgacaggactcaggcgatagctgggctccgtgcattggcggctggtcaacatgctcctggggtcgtcaacccagctgaaggttccccaggaccaggcaccgtgttcgtttttcccggtcaaggttcgcagagggcagggatgggggaggaactcgcggcagcctttcctgtcttcgctcgaatacatcagcaagtttgggacctcctagatgttcccgacctcgacgttaatgaaaccgggtacgcccaaccagcgctgttcgcgcttcaggtcgcgctctttggccttctggagtcgtggggtgttaggccagatgcagtggtagggcactcagttggtgagctggccgcggggtacgtgtccggtctttggtcactagaggacgcctgcacactagtctcagcaagagcgcgcctaatgcaggcactgcctgctggaggggtgatggcggcagtccccgtctccgaggatgaggcgcgggccgtcctgggcgagggagttgaaattgcggctgtgaatggaccctcgtccgttgtgctctcaggggacgaggcggcagtcttacaggccgccgaaggtctaggtaagtggacgcgactgccgaccagccatgcttttcactcagcgagaatggaacccatgctagaagagtttcgggccgtagcagagggtctgacctatcgtacccctcaagtagctatggctgctggggatcaggtgatgacagcagaatattgggtgcggcaggttcgggacacagttcgcttcggggagcaagtagcgtcattcgaggatgcggtgtttgttgagttaggcgctgacagaagtctagcgcgtttggtggacggcatcgccatgctgcacggtgaccacgaagcgcaggccgcggaccataggcaaatcaccgaagcggttgcggatgcttacgtcttaggccaccttccggattttgcggcgctgcggcggcctcacgcacgaaagttggacttaccaacttatcccttcgagcgtagacagtactggttcagagatgcgcgtgagaggccggaacaacccagagataccggcggacctcgcacagaagcagtccgtctgttagaggatggtaggattgaagaattagctgcacttttgggaggggccagtgatgaccaacacacattacaggtgctgactaagttggcggcgcaacataaccaacaacgaacaacccggtcaatcgctgacgacaggtacgaaataaggtgggaccgatcgacttccccactatccggagcagatgttgaccaagcggggagctggatcgtggtgtcagatgacgcagatgccgttcccccgctagtggacttgctggctgcacgtaacgagccccatcaggttgttggtctacccgcttcggacgcagacgaggagaggctcgcagagactctgcgtgcggctgcgactgaagatgctacccttcggatagtccacgttgcggcgctcgaagcaggcgctacccccagcatgcgttcactgctccgcatgcagcaccgaatactaggtggcacgcggcgggtgttcagggcagcggtcgcagcggagttaagaggtcccatttggatagtgacgcggggagcacaaagagtggctgacaccgatacagttgccccgcatcagtcatgcctctggggatttgggagggcagcatcgctggagctgccgcacgtttggggtggcctagcagatttatcagagggcggtgacaatgcggccgatgagtggagtgcgctagtggaccgcattgccgcaccccacggttcagcagttagggaggaccaactggcgctgagagacagggccgtatatacgccaagactggccagacgttctgcgcccccgagcgggactcccctacatctacgaggggatggcacagtgttaataacaggtgggactggtacactaggtaggctattagcgcgtcacctagtaacagagcatggggtgcggcatctcttactagtttcaaggagaggcgccgatgcccctggctcggatgaactgcgcgcagaaatagaggacttaggtgccagcgcggagatcgcagcgtgtgatacagcggatcgcgatgccctatctgccctactagatggtctcccccggccccttacgggtgtcgttcacgccgctggcgtgttagccgatggacttgtcactagcattgacgagcctgcggtggaacaggttctccgagcaaaggtggacgcggcatggaacctacacgaactcacagctaataccgggctatcctttttcgttcttttctcatcagcagcatcggtcctggcaggtccagggcaaggagtttatgcggctgcaaatgaatcgctcaacgcactagctgcgttaaggcgaactaggggtctgccggccaaggctctgggatggggcctgtgggccatcgggcgggcaatcgcttttgcggagcagaccggggacgccatcgctccagaggaaggagcatacgcttttgaaactctgttaaggcataaccgtgcctactcgggatatgcgcccgtcattggatctccctggttgaccgcgttcgcacagcattccccctttgcagaaaaattccaatcactcggacagaatcggtcagggacatcgaaattcttagcggagctagttgacctgcctcgtgaggaatggccggataggctcaggagactactagagttagttaggtcccatgccgccgcggtctccggttacggtagtgcagatcaactgccggaaagaaaagcgttcaaggatttggggtttgattcgctggccgccgttgaactgcgtaaccggctgggaacggctacaggggtacgactgccgtcaaccctagtatttgatcacccaactccgctggccgtcgctgagcacttaagagataggctaacatccggggaagataaccctatccccctatgtcaaggcgatggggaggagatgagcacatggctacgtcgttttggacccccagtcgaacatcgggccaggctagtgtgtttcccccacgcaggcgcagcggcggattcatacttagacctagcaagagcgttagcaccagagatcgatgttcatgctgttcaataccccggcaggcaagacagaagggacgaggagccattaggaaccgcaggtgaaattgcagatgaagtggcagcggtgctacgtgcgtcgggaggggatgggccttttgcacttttcggccacagtatgggcgccctcatcgcgtacgagacagcaaggcgattagagagggaaccgggagggggacccttacgtttattcgtgagcggacaaacagcgccacgtgtccatgaacgaagaactgatctgcccggtgacgatggactcgtggacgagcttaggcgacttggcacctccgaggcagcgctcgcagacgaagccctgctggctatgtctctcccggtgctcagggcggattatagggtgttaagatcctacgcttgggcggatggtcccccactacgcgccggtataactgccctctgcggtgatgcagacccactaactgcaacaggggatgcggaacgctggttacaacattccgtgattccgggtcggacacggacatttcccggtgggcatttttatttaggggaacaagtgaccgaggtggcaggggctgtccgtagagatttactgagagcagggttagcgggttga

SEQ ID NO: 28 - DNA, 11625 bp, Artificial Sequence
  MOS
atgaacccaccctgcgggccagtccgtgcgaattgcgtacacatatccatagatttccccatgccagtttccaaagtttccggtcctcgatcaaggacaaccagccggaggacacccgtccggattggggccgtggtggtggcaagctcgactagcgaactccttgatgggctcgcagcggttgctgatggtaggccacacgccagcgtagttaggggcgttgcgcgcccttctgcgccggttgtattcgttttcccaggtcaaggagcgcaatgggctgggatggcgggggagctactcggggagagtcgggtctttgcagccgctatggacgcctgcgcgagggcgttcgaacctgtaaccgattggacattggcccaagttttggattcaccagagcaatcccggcgtgtagaggtcgtccaacccgccctttttgcagtgcagacctctttggctgcactctggagatctttcggcgtgacacccgacgcagtcgtagggcactctatcggggagcttgcggcggcgcacgtctgtggggcagccggggcagctgacgcggcaagagctgccgcactgtggtcacgagaaatgatcccactagtggggaacggtgacatggcggcggttgcactctcggcagatgagattgaaccacggatcgcccgttgggacgacgacgtcgtgcttgctggtgttaatggtccccgctcggttttactaaccggcagccctgaaccagtagcaagaagggtacaagaactttcggcagagggagttcgggcacaggtcattaatgtgagcatggcggcccattccgcgcaggtggacgatattgcagaagggatgagatcggctctggcgtggtttgccccaggcgggtccgaagttccattttacgccagcctcactgggggagccgtggacacgcgagaactcgttgcggattactggcgacgctcattcagactgcccgttcgtttcgatgaagctataagatcagccctggaagttgggccaggtacattcgtcgaggcctcaccccacccagtcctggcggctgccctacagcagacactggacgcagaggggtcgtcggcagcggtggtccccacattacagcgggggcaaggcggaatgcgtcggttcctcttggcagcggcacaggcattcactggaggagtggccgtcgattggaccgcggcctatgatgatgtggggcctaacccggccctatgtcgatcgtctcggcgcccaagacggaaaacttcgcgaccgtcaccagcttcgacgggaacaagacatagaacttgctgcgaacggctgctcgccgtcgtgaacggcgaaactgccgcattagccggacgtgaagcagatgcagaggcaacctttcgagagcttgggttagattccgttctggcggcccagctcagagctaaagtatccgcggcgataggtcgagaagtcaatattgcactactctatgaccacccaaccccgagagcactcgcagaggcacttgctggcctaccccaggaaattaaacacacgccggcggttcggaccacatccgaagatccaattgccatcgtttcgatggcatgtcgtttaccgggaggagtcaatacgccccaacggctctgggaattactacgggagggtggtgaaaccttgtccgggttcccaacggaccgtggctgggacctagcacggcttcaccaccctgatccggacaaccccggaacgagctacgttgataagggtggatttctcgacgacgcggcgggtttcgacgcagagtttttcggggtttcaccaagggaagctgccgctatggaccctcagcaacgattacttttagagacctcgtgggagctagttgaaaatgcgggcatagatccacatagcctgcgagggacagcgacaggggtgttcctaggagttgcgaagtttggttatggtgaggacacagcagcagcggaagatgttgaaggttattcagttaccggtgttgctcccgctgtggcatctggccgcatatcctacactatgggtttagaaggtccttccatctcggtcgataccgcatgctcaagctcgctagtcgcgcttcatctagccgtagagtccctccgaaagggtgagtcatctatggcggtggtgggtggtgcagccgttatggcgactcctggggtatttgttgatttttcacgccaacgggcgcttgccgcagacggccgttccaaagcgttcggggcaggtgcagatggttttggtttcagcgagggagtcacgctggttctactagagcgtttaagtgaggcgcgtcgtaacggtcatgaagttctagctgtagtgcgcgggtccgcgttaaaccaggacggagcgagcaacggactttcagcaccctccggccctgcgcaacgtagagtaataaggcaagcgctcgaatcgtgtgggcttgaaccgggggatgttgacgcggttgaggcgcatggtactggtacagcactaggtgacccaatagaggccaatgcgctgttggacacttacgggcgagaccgtgatgcggatcgtccactttggttggggtccgttaagagcaatattgggcacactcaagctgcggccggggttacaggactgctgaaggttgtgttagcactgcgcaatggtgagctacctgcaacgttacatgtcgaggaaccaactccacacgtcgattggtcctcaggtggtgtcgcattactggcgggtaatcaaccatggcgaaggggagaaaggaccagaagggcggcagtgagcgcctttggtatctccggtacaaatgctcacgtgatagtggaagaggcgcctcaggaagttcgacccgcccctggccaagggctgtcgccagccgtgtccacgttagttgttgcaggtaaaaccatgcagcgtgtaagtgcgacagctggaatgcttgcagactggatggagggtcctggggccgatgttgcattggcggatgtggcccataccctgaaccatcaccgatcaagacagcccaagttcgggacggttgtagcgcgtgacaggactcaggcgatagctgggctccgtgcattggcggctggtcaacatgctcctggggtcgtcaacccagctgaaggttccccaggaccaggcaccgtgttcgtttttcccggtcaaggttcgcagagggcagggatgggggaggaactcgcggcagcctttcctgtcttcgctcgaatacatcagcaagtttgggacctcctagatgttcccgacctcgacgttaatgaaaccgggtacgcccaaccagcgctgttcgcgcttcaggtcgcgctctttggccttctggagtcgtggggtgttaggccagatgcagtggtagggcactcagttggtgagctggccgcggggtacgtgtccggtctttggtcactagaggacgcctgcacactagtctcagcaagagcgcgcctaatgcaggcactgcctgctggaggggtgatggcggcagtccccgtctccgaggatgaggcgcgggccgtcctgggcgagggagttgaaattgcggctgtgaatggaccctcgtccgttgtgctctcaggggacgaggcggcagtcttacaggccgccgaaggtctaggtaagtggacgcgactgccgaccagccatgcttttcactcagcgagaatggaacccatgctagaagagtttcgggccgtagcagagggtctgacctatcgtacccctcaagtagctatggctgctggggatcaggtgatgacagcagaatattgggtgcggcaggttcgggacacagttcgcttcggggagcaagtagcgtcattcgaggatgcggtgtttgttgagttaggcgctgacagaagtctagcgcgtttggtggacggcatcgccatgctgcacggtgaccacgaagcgcaggccgcggaccataggcaaatcaccgaagcggttgcggatgcttacgtcttaggccaccttccggattttgcggcgctgcggcggcctcacgcacgaaagttggacttaccaacttatcccttcgagcgtagacagtactggttcagagatgcgcgtgagaggccggaacaacccagagataccggcggacctcgcacagaagcagtccgtctgttagaggatggtaggattgaagaattagctgcacttttgggaggggccagtgatgaccaacacacattacaggtgctgactaagttggcggcgcaacataaccaacaacgaacaacccggtcaatcgctgacgacaggtacgaaataaggtgggaccgatcgacttccccactatccggagcagatgttgaccaagcggggagctggatcgtggtgtcagatgacgcagatgccgttcccccgctagtggacttgctggctgcacgtaacgagccccatcaggttgttggtctacccgcttcggacgcagacgaggagaggctcgcagagactctgcgtgcggctgcgactgaagatgctacccttcggatagtccacgttgcggcgctcgaagcaggcgctacccccagcatgcgttcactgctccgcatgcagcaccgaatactaggtggcacgcggcgggtgttcagggcagcggtcgcagcggagttaagaggtcccatttggatagtgacgcggggagcacaaagagtggctgacaccgatacagttgccccgcatcagtcatgcctctggggatttgggagggcagcatcgctggagctgccgcacgtttggggtggcctagcagatttatcagagggcggtgacaatgcggccgatgagtggagtgcgctagtggaccgcattgccgcaccccacggttcagcagttagggaggaccaactggcgctgagagacagggccgtatatacgccaagactggccagacgttctgcgcccccgagcgggactcccctacatctacgaggggatggcacagtgttaataacaggtgggactggtacactaggtaggctattagcgcgtcacctagtaacagagcatggggtgcggcatctcttactagtttcaaggagaggcgccgatgcccctggctcggatgaactgcgcgcagaaatagaggacttaggtgccagcgcggagatcgcagcgtgtgatacagcggatcgcgatgccctatctgccctactagatggtctcccccggccccttacgggtgtcgttcacgccgctggcgtgttagccgatggacttgtcactagcattgacgagcctgcggtggaacaggttctccgagcaaaggtggacgcggcatggaacctacacgaactcacagctaataccgggctatcctttttcgttcttttctcatcagcagcatcggtcctggcaggtccagggcaaggagtttatgcggctgcaaatgaatcgctcaacgcactagctgcgttaaggcgaactaggggtctgccggccaaggctctgggatggggcctgtgggccatcgggcgggcaatcgcttttgcggagcagaccggggacgccatcgctccagaggaaggagcatacgcttttgaaactctgttaaggcataaccgtgcctactcgggatatgcgcccgtcattggatctccctggttgaccgcgttcgcacagcattccccctttgcagaaaaattccaatcactcggacagaatcggtcagggacatcgaaattcttagcggagctagttgacctgcctcgtgaggaatggccggataggctcaggagactactagagttagttaggtcccatgccgccgcggtctccggttacggtagtgcagatcaactgccggaaagaaaagcgttcaaggatttggggtttgattcgctggccgccgttgaactgcgtaaccggctgggaacggctacaggggtacgactgccgtcaaccctagtatttgatcacccaactccgctggccgtcgctgagcacttaagagataggctactgccagtagaacagccttttgtgcactcaccggaagagcggtatcgaccattcgcgttaacggatgttcagcaagcctacctggtcgggcgccagccgggatttgccctgggcggtgtaggctcgcatttcttcgtggaattcgagatcgcagatctcgacatacaccgcctggaaaaagtgtggaaccgtttaattgcacgtcatgatatgttgcgcgctgtggttcgtgacggtcagcaacgtgtactggaacagaccccgccatgggtcataccagcacatattcttcacagtcctgaagaggcattacaggttcgtgatcgtttagctcaccaagtgttgaaccccgaagtctggccggtatttgatctgcaggtgggcttcgttgacggtatgccggcccgtttatggttgtgccttgataacctgttattggacgggctgagcatgcagattcttctctctgaactggagcatggatatcgctacccacagcaactccctcccccgttgccgatcacttttcgcgattatcttcagcaaccggcactccgtaccccaaatcctgactcattggcttggtggcagacgcaactggatgacatcccacctgcgcccgccctcccgctacgttgtctgcctcaagatgttgaaaccccgcgtttcgcgcgtctgtacggcgcaatggattctgctcgttggcgtcgcctgaaacagcgtgcggccgacgcacatctgactccgtcagctgtcctactgagcgtatggtctacagtgctggcagcttggtcggcgcagccggattttactctcaacctgacattattcgaccggcgaccactgcaccctcagattaatcaaatccttggcgattttacctcactgatgttattgtcgtggcatccgggtgagagttggctgcagtccgcgcgtcttctccagcaacgcctttcagaatcgctcaaccaccgtgatgttagcgccattcgcgtcatgcggcagctggcgagaaggcaaaatgtcccggccgtacccatgccggtcgtatttacctctgcgctggggtttgaacaggataacttcctggcccgtcgcaatctactgaaaccggtgtggggtatcagtcagacgccgcaagtttggctggaccatcaggtctatgaatccgagggcgaactgcgttttaactgggatttcgttgcggccctgtttccggacggtcaagtggaacgtcagttcgcgcaatactgcgccttattgaatcgcatggcagaagatgacagctcttggcagttgccgcttgctgatctggtgcccccgttaaaagtgaccgagcggcgagcgagaaggctgcgtccagaacgcgcccagcctcgtattgcagctgataagagttccgttagtctgatctgtgacacttttcgtgaggtggttggggaacccgtggcaccggctgagaactttttcgaagcgggagccacatccctcaatctggttcagctgcatgtccttctccaacgtcacgaatttgcgaccttaacgctactggatttgttcacccatccaagccctgttgcattggctaactatcttgcgggtgtggccctggaagagaaaacgaagcgcgtgcggccggttcggcgaagacagcgtcgcattcagcacttgcccttagtagctgcgcaacctggaatatggatggccgagaagttatctgaactaccatcagcgtggagcgtagcgcattacgtggagctcactggtgaggttgactcgcctcttttggccagggcggtagtggctggccttgcacaagctgacaccttaagaatgcgtttcacagaggataatggggaagtttggcaatgggtagacgatgcgttaacatttgagttaccggaaatcatagacctgcgcactaacatagaccctcacgggacagctcaggccttgatgcaagcggacctgcaacaggacctacgtgtggattcggggaagcctctggtcttccatcagctaattcaagtagcggacaatcgctggtactggtatcaaaggtaccaccacttgcttgtggacgggttcagttttccagcgataaccaggcaaatagccaacatttattgcacttggttgcgaggagagcctacgcccgcatcccccttcacgccattcgcagacgttgttgaggaataccaacagtatcgcgagagcgaagcgtggcaacgcgatgcggcattctgggcggagcaacgacggcaactaccgcctcccgcatccctatcacctgccccgctccccggccggtccgcgtcagccgacattctacggctaaagctggagttcacagatggtgaatttcgacagcttgctacacaactcagcggggtacaaaggacagacctagcgctcgctctggctgcattatggctaggacgactttgcaatcgaatggactacgcggcgggtttcatatttatgcgccggctcggcagcgcagcgttgaccgcaacgggtccagttttaaatgttcttcctttgggaatccacataggcaacccaagcttctctgagcttctcaccagggttcgcgaggtcgccttaggcgcgtatgcacaccaacatattccttttgagatgttagtagaggcactgcaaccagagcgaaaccttagccatactcctctcttccaagtgatgtttgtccttcagaatgcgcccgcgtcccaattagagttaaccgggatcaccgcaaacccaattaaggttaaatcaactaccacgaagttcgacctaactttaatcatgcaaaacacagctagcggattagtaggtgtttgggagtacaacacggatttattcgacgcgtcaacgattgagcgaatgacagggcactttgtaaccctcctcgagggcgttatcgccaatccacaacagccgatctctcaacttcctattttaactacagtggagcaacagcaacttttagtcgagtggaataacacgcaaaccgactaccccgctgataagtgtatacatcaattattcgaggaacaggtcgagcgcacaccagacgccgttgctgtcgtctttgggaatcagcaactcagctatcgagagatgcgcgaacaagtggttgcactcgccaatttattacgtgagcggggagtcaagccaggagactccgttgccgtggccttaccacgctctgttttcttaacccttgcactacacgcgattgtcgaggcaggtgccgcctggctacctcttgacacaggatatcctgacgatagattaaaaatgatgctcgaggatgcacggccttcccttctgatcacaacagacgatcaattaccccgcttcagtgacgtacctaatctgacctcactctgttacaacgctcccttgacgcctcaagggagcgcccctttacagctgtctcaacctcaccatactgcatatatcatctttacaagtggttctacgggacgccccaagggagtaatggttggtcagactgcgattgtaaatcgtctgttgtggatgcaaaaccactaccctttgacgggggaggacgttgtagcccaaaagactccttgctcgttcgatgtctcagtctgggagttcttttggccatttatagcaggggccaaattagttatggcggagccggaagcccaccgagacccacttgcgatgcagcaattctttgctgagtatggtgtcaccactacacatttcgtcccatcgatgttagcggccttcgtggcttctcttactccacaaacggctaggcaatcttgtgccacactaaagcaagtcttctgctccggcgaggcattacctgcagacttgtgccgggaatggcagcaactcacaggagctccattgcacaatctatacggaccgaccgaggccgcagtagacgtatcttggtatcctgcgtttggcgaggagttagcgcaagtaagaggttcgtcagtaccaataggataccccgtatggaacacggggcttcggatactggacgcgatgatgcatccggtcccaccaggagtcgcgggcgatttatacctgactgggatacagctggcccaaggttacctagggagacctgaccttacggcgtcgaggttcatagcggatccgtttgctccgggtgagcgcatgtaccgtacgggcgacgtcgcgcgatggctagataatggcgccgtagagtatcttggtagatcagacgatcagttaaagatacggggacaacgaatagagcttggggaaatagaccgggtaatgcaggctttgccagatgtcgagcaagcggtggcttcgtgtgctattgcgcgggaggacatacctgggaacaaacaccttgtagcgtacatagttcctcaagaggagcaaacatgcactgagcgatcgaggtccacacttacagtttcgttcgtccggagtttccttaaggagaaactccccgaatatatggtaccgagcgcaatagtgattctagacgctctccccctgactcctaatggaaagctagaccggcgggcgttacccgcccctgacctgcactcacaacttgagacaattattgctgcggctttctcgagcctgctcgggtgcgacgtacaagacgcggatgctgactttttcgcgctaggtggccattcgctgcttgccatgaagctagccgctcagctttcccgacaagtagcgcggcaggtgacaccaggccaagttatggtagcttcgactgtcgcaaagctcgcaacgatcatagacgcggagttagataaatacgtcgctccaaggaacccgataacatccggggaagataaccctatccccctatgtcaaggcgatggggaggagatgagcacatggctacgtcgttttggacccccagtcgaacatcgggccaggctagtgtgtttcccccacgcaggcgcagcggcggattcatacttagacctagcaagagcgttagcaccagagatcgatgttcatgctgttcaataccccggcaggcaagacagaagggacgaggagccattaggaaccgcaggtgaaattgcagatgaagtggcagcggtgctacgtgcgtcgggaggggatgggccttttgcacttttcggccacagtatgggcgccctcatcgcgtacgagacagcaaggcgattagagagggaaccgggagggggacccttacgtttattcgtgagcggacaaacagcgccacgtgtccatgaacgaagaactgatctgcccggtgacgatggactcgtggacgagcttaggcgacttggcacctccgaggcagcgctcgcagacgaagccctgctggctatgtctctcccggtgctcagggcggattatagggtgttaagatcctacgcttgggcggatggtcccccactacgcgccggtataactgccctctgcggtgatgcagacccactaactgcaacaggggatgcggaacgctggttacaacattccgtgattccgggtcggacacggacatttcccggtgggcatttttatttaggggaacaagtgaccgaggtggcaggggctgtccgtagagatttactgagagcagggttagcgggttga

SEQ ID NO: 29 - DNA, 11970 bp, Artificial Sequence
  MSC
atgaacccaccctgcgggccagtccgtgcgaattgcgtacacatatccatagatttccccatgccagtttccaaagtttccggtcctcgatcaaggacaaccagccggaggacacccgtccggattggggccgtggtggtggcaagctcgactagcgaactccttgatgggctcgcagcggttgctgatggtaggccacacgccagcgtagttaggggcgttgcgcgcccttctgcgccggttgtattcgttttcccaggtcaaggagcgcaatgggctgggatggcgggggagctactcggggagagtcgggtctttgcagccgctatggacgcctgcgcgagggcgttcgaacctgtaaccgattggacattggcccaagttttggattcaccagagcaatcccggcgtgtagaggtcgtccaacccgccctttttgcagtgcagacctctttggctgcactctggagatctttcggcgtgacacccgacgcagtcgtagggcactctatcggggagcttgcggcggcgcacgtctgtggggcagccggggcagctgacgcggcaagagctgccgcactgtggtcacgagaaatgatcccactagtggggaacggtgacatggcggcggttgcactctcggcagatgagattgaaccacggatcgcccgttgggacgacgacgtcgtgcttgctggtgttaatggtccccgctcggttttactaaccggcagccctgaaccagtagcaagaagggtacaagaactttcggcagagggagttcgggcacaggtcattaatgtgagcatggcggcccattccgcgcaggtggacgatattgcagaagggatgagatcggctctggcgtggtttgccccaggcgggtccgaagttccattttacgccagcctcactgggggagccgtggacacgcgagaactcgttgcggattactggcgacgctcattcagactgcccgttcgtttcgatgaagctataagatcagccctggaagttgggccaggtacattcgtcgaggcctcaccccacccagtcctggcggctgccctacagcagacactggacgcagaggggtcgtcggcagcggtggtccccacattacagcgggggcaaggcggaatgcgtcggttcctcttggcagcggcacaggcattcactggaggagtggccgtcgattggaccgcggcctatgatgatgtggggcctaacccggccctatgtcgatcgtctcggcgcccaagacggaaaacttcgcgaccgtcaccagcttcgacgggaacaagacatagaacttgctgcgaacggctgctcgccgtcgtgaacggcgaaactgccgcattagccggacgtgaagcagatgcagaggcaacctttcgagagcttgggttagattccgttctggcggcccagctcagagctaaagtatccgcggcgataggtcgagaagtcaatattgcactactctatgaccacccaaccccgagagcactcgcagaggcacttgctgtgccggttgagcagccatttgtgcatagccctgaagatcgctatcaaccgttcgcgctgaccgacgtacagcaagcctacctggtggggcgtcagccgggatttgccctgggcggtgttggctctcatttcttcgtcgaattcgagattgcagatttagacttgacccgcctggaaacggtttggaaccgtttaatagcacgccacgatatgttgcgtgctattgtacgtgacggtcagcaacaggtgctggaacagaccccgccatgggtgatcccggcgcatactctgcacacaccagaagaggcattacgagttagagaaaaactggctcatcaggtcttaaaccctgaagtctggcccgtatttgatctgcaagtgggctatgttgacggtatgccggcacgtctttggctctgcctagataatctattattggacgggctgagtatgcagattcttctcgccgaactggagcacggatatcgttaccctcaacagctactgcctcccctgccagttacctttcgtgattacttgcaacagccgagccttcagtctccgaacccagacagcctggcatggtggcaggctcaactggatgacatcccgccagcaccggctctcccactgcgttgtctgccacaggaagtggagactcctcgattcgcacggcttaatggcgctctcgattcaacacgttggcatcgtctgaaaaagcgcgcggccgacgcgcacctgactccgtcggccgtgttattgagtgtttggtccacagtcctgtcagcatggtcggctcagccggaatttactttaaacttgacacttttcgatcgtcgccctctgcatccccagattaatcaaatcttgggcgattttacctcacttatgcttctctcgtggcatccgggtgaatcctggctgcacagcgcgcagtctctgcaacagcgcttaagtcaaaacttgaatcaccgtgatgtttccgccattcgcgtcatgcggcagctggcgcaacagcaaaatgtcccggccgtacctatgcccgtggttttcacctctgcgctgggctttgaacaggataacttcctggcccggcgaaatctactgaaaccggtatggggtattagccagacgccgcaagtctggctggatcatcagatctatgaatctgagggcgaactgcgttttaactgggatttcgttgcagctctgtttccggcgggtcaggtggagcgtcagttcgaacaatactgcgcattattgaatcgcatggctgaggatgaaagcgggtggcagctcccgctggcggccctggtgcctcccgttaaacatgcgggtcagtgcgccgagcgcagcccgcgtgtttgtccagaacagtctcaaccgcacatcgcagctgatgaaagtactgtttccctgatatgtgacgcatttcgtgaggtcgtaggggaaagtgtgaccccggctgagaactttttcgaagcgggagccacgtccttaaatttggtacagctgcatgtgcttctccaacgtcacgaattttcaaccctgacgctactggatttattcacgcacccgtcgccagcggcccttgcggactatctcgcgggtgtcgccaccgtagaaaaaacgaagaggcctcggcccgtgagaaggcgtcagcgccggatccagcacttgcccttagtagctgcgcaacctggaatatggatggccgagaagttatctgaactaccatcagcgtggagcgtagcgcattacgtggagctcactggtgaggttgactcgcctcttttggccagggcggtagtggctggccttgcacaagctgacaccttaagaatgcgtttcacagaggataatggggaagtttggcaatgggtagacgatgcgttaacatttgagttaccggaaatcatagacctgcgcactaacatagaccctcacgggacagctcaggccttgatgcaagcggacctgcaacaggacctacgtgtggattcggggaagcctctggtcttccatcagctaattcaagtagcggacaatcgctggtactggtatcaaaggtaccaccacttgcttgtggacgggttcagttttccagcgataaccaggcaaatagccaacatttattgcacttggttgcgaggagagcctacgcccgcatcccccttcacgccattcgcagacgttgttgaggaataccaacagtatcgcgagagcgaagcgtggcaacgcgatgcggcattctgggcggagcaacgacggcaactaccgcctcccgcatccctatcacctgccccgctccccggccggtccgcgtcagccgacattctacggctaaagctggagttcacagatggtgaatttcgacagcttgctacacaactcagcggggtacaaaggacagacctagcgctcgctctggctgcattatggctaggacgactttgcaatcgaatggactacgcggcgggtttcatatttatgcgccggctcggcagcgcagcgttgaccgcaacgggtccagttttaaatgttcttcctttgggaatccacataggcaacccaagcttctctgagcttctcaccagggttcgcgaggtcgccttaggcgcgtatgcacaccaacatattccttttgagatgttagtagaggcactgcaaccagagcgaaaccttagccatactcctctcttccaagtgatgtttgtccttcagaatgcgcccgcgtcccaattagagttaaccgggatcaccgcaaacccaattaaggttaaatcaactaccacgaagttcgacctaactttaatcatgcaaaacacagctagcggattagtaggtgtttgggagtacaacacggatttattcgacgcgtcaacgattgagcgaatgacagggcactttgtaaccctcctcgagggcgttatcgccaatccacaacagccgatctctcaacttcctattttaactacagtggagcaacagcaacttttagtcgagtggaataacacgcaaaccgactaccccgctgataagtgtatacatcaattattcgaggaacaggtcgagcgcacaccagacgccgttgctgtcgtctttgggaatcagcaactcagctatcgagagatgcgcgaacaagtggttgcactcgccaatttattacgtgagcggggagtcaagccaggagactccgttgccgtggccttaccacgctctgttttcttaacccttgcactacacgcgattgtcgaggcaggtgccgcctggctacctcttgacacaggatatcctgacgatagattaaaaatgatgctcgaggatgcacggccttcccttctgatcacaacagacgatcaattaccccgcttcagtgacgtacctaatctgacctcactctgttacaacgctcccttgacgcctcaagggagcgcccctttacagctgtctcaacctcaccatactgcatatatcatctttacaagtggttctacgggacgccccaagggagtaatggttggtcagactgcgattgtaaatcgtctgttgtggatgcaaaaccactaccctttgacgggggaggacgttgtagcccaaaagactccttgctcgttcgatgtctcagtctgggagttcttttggccatttatagcaggggccaaattagttatggcggagccggaagcccaccgagacccacttgcgatgcagcaattctttgctgagtatggtgtcaccactacacatttcgtcccatcgatgttagcggccttcgtggcttctcttactccacaaacggctaggcaatcttgtgccacactaaagcaagtcttctgctccggcgaggcattacctgcagacttgtgccgggaatggcagcaactcacaggagctccattgcacaatctatacggaccgaccgaggccgcagtagacgtatcttggtatcctgcgtttggcgaggagttagcgcaagtaagaggttcgtcagtaccaataggataccccgtatggaacacggggcttcggatactggacgcgatgatgcatccggtcccaccaggagtcgcgggcgatttatacctgactgggatacagctggcccaaggttacctagggagacctgaccttacggcgtcgaggttcatagcggatccgtttgctccgggtgagcgcatgtaccgtacgggcgacgtcgcgcgatggctagataatggcgccgtagagtatcttggtagatcagacgatcagttaaagatacggggacaacgaatagagcttggggaaatagaccgggtaatgcaggctttgccagatgtcgagcaagcggtggcttcgtgtgctattgcgcgggaggacatacctgggaacaaacaccttgtagcgtacatagttcctcaagaggagcaaacatgcactgagcgatcgaggtccacacttacagtttcgttcgtccggagtttccttaaggagaaactccccgaatatatggtaccgagcgcaatagtgattctagacgctctccccctgactcctaatggaaagctagaccggcgggcgttacccgcccctgacctgcactcacaacttgagacaattattgctgcggctttctcgagcctgctcgggtgcgacgtacaagacgcggatgctgactttttcgcgctaggtggccattcgctgcttgccatgaagctagccgctcagctttcccgacaagtagcgcggcaggtgacaccaggccaagttatggtagcttcgactgtcgcaaagctcgcaacgatcatagacgcggagttagataaatacgtcgctccaaggaacccgatactgccagtagaacagccttttgtgcactcaccggaagagcggtatcgaccattcgcgttaacggatgttcagcaagcctacctggtcgggcgccagccgggatttgccctgggcggtgtaggctcgcatttcttcgtggaattcgagatcgcagatctcgacatacaccgcctggaaaaagtgtggaaccgtttaattgcacgtcatgatatgttgcgcgctgtggttcgtgacggtcagcaacgtgtactggaacagaccccgccatgggtcataccagcacatattcttcacagtcctgaagaggcattacaggttcgtgatcgtttagctcaccaagtgttgaaccccgaagtctggccggtatttgatctgcaggtgggcttcgttgacggtatgccggcccgtttatggttgtgccttgataacctgttattggacgggctgagcatgcagattcttctctctgaactggagcatggatatcgctacccacagcaactccctcccccgttgccgatcacttttcgcgattatcttcagcaaccggcactccgtaccccaaatcctgactcattggcttggtggcagacgcaactggatgacatcccacctgcgcccgccctcccgctacgttgtctgcctcaagatgttgaaaccccgcgtttcgcgcgtctgtacggcgcaatggattctgctcgttggcgtcgcctgaaacagcgtgcggccgacgcacatctgactccgtcagctgtcctactgagcgtatggtctacagtgctggcagcttggtcggcgcagccggattttactctcaacctgacattattcgaccggcgaccactgcaccctcagattaatcaaatccttggcgattttacctcactgatgttattgtcgtggcatccgggtgagagttggctgcagtccgcgcgtcttctccagcaacgcctttcagaatcgctcaaccaccgtgatgttagcgccattcgcgtcatgcggcagctggcgagaaggcaaaatgtcccggccgtacccatgccggtcgtatttacctctgcgctggggtttgaacaggataacttcctggcccgtcgcaatctactgaaaccggtgtggggtatcagtcagacgccgcaagtttggctggaccatcaggtctatgaatccgagggcgaactgcgttttaactgggatttcgttgcggccctgtttccggacggtcaagtggaacgtcagttcgcgcaatactgcgccttattgaatcgcatggcagaagatgacagctcttggcagttgccgcttgctgatctggtgcccccgttaaaagtgaccgagcggcgagcgagaaggctgcgtccagaacgcgcccagcctcgtattgcagctgataagagttccgttagtctgatctgtgacacttttcgtgaggtggttggggaacccgtggcaccggctgagaactttttcgaagcgggagccacatccctcaatctggttcagctgcatgtccttctccaacgtcacgaatttgcgaccttaacgctactggatttgttcacccatccaagccctgttgcattggctaactatcttgcgggtgtggccctggaagagaaaacgaagcgcgtgcggccggttcggcgaagacagcgtcgcattggagagccgttcccactcgctcctatgcaacacgccatgtgggtagggcggcacgaccaccaacagctcgggggagtagcaggccatctttacgtcgagtttgacggcgcgagagtcgaccccgatcggttgcgcgctgccgccacccgactcgccctacgtcaccctatgttgagggtacagttcctgcctgacggtacacaaaggatccctccagccgcaggctcgcgggactttcccatcagcgttgcggatcttcgtcacgtagctcctgacgttgtcgatcaacggctcgcgggtattagagacgcaaagtctcatcaacagcttgatggagctgtcttcgagttggctctcactctcctgccaggtgaaaggacgaggctgcacgtcgacctggatatgcaagctgctgacgccatgagctacaggatcctgctggcggacttggccgcactatacgacgggagagagcccccagcactcggttacacgtatagagagtaccgccaggctattgaggccgaggaaacattaccgcaacctgttcgcgacgccgatagggactggtgggcacaaagaataccacagcttccagacccgcccgcactaccgacgcgtgccggtggtgagagagatcgccggcgctcgaccagaagatggcactggttagacccacaaacaagggacgccctcttcgcacgagcacgagctcgtggcatcacacctgcaatgacacttgcggccgcgtttgcaaatgtcctcgcgagatggtccgcctcttcccggttcttactcaatttgccccttttctcgcgccaagcgttgcatccggacgtagacctcttggtaggtgacttcacatcgtcgctgctgttagatgttgacctaggagatacagtgtctaatcttgctcggaagaaccaactgacttttacggaggactgggaacaccggcattggagcggagtagagttgctgcgagaactcaaaaggcaacagcgttacccacacggagcgcccgtggtgttcacttctaatcttgggcgcagtttatattcttctcgggcggagtcccccttgggagagcctgaatggggaatttcgcaaacaccacaggtttggatcgaccatttagcatttgagcaccatggggaagtatggctccaatgggactcgaacgacgccctcttcccacctgctttagtcgagactctgtttgacgcgtactgtcaattgataaaccagctgtgcgacgatgaatccgcatggcaaaagcccttcgcggacatgatgccggcgagtcagcgtgctattcgtgagcgggtgaacgctaccggcgcaccgatcccggagggcctcttacacgaagggatttttcggatcgctcttcaacagcctcaggcgctcgcggtaacggacatgcggtaccaatggaatagttatcgagagatgcgggaacaggtcgtcgctttggcaaatctactccgagagcgcggggtcaagccaggggactcagtcgctgtagcgcttcctcggtcagtcttcctaaccttggctctccacgcgatcgtagaggcgggtgcggcgtggcttcccctcgacacgggctatccggacgatcggttgaagatgatgctagaggatgcacgaccctctctgttaatcacaaccgacgatcaactccccaggttctcagacgtccctaatcttaccagtctatgttacaacgcgcccctcactccacaaggcagcgctcctttacaacttagtcagccgcaccataccgcttatatcatttttacgtccggttccacgggcaggccgaagggtgtaatggtgggccaaactgcaatagtgaatagactattgtggatgcaaaaccactacccgcttaccggggaggacgtagtggctcaaaagactccctgctctttcgatgtcagcgtgtgggagttcttttggccttttatagccggcgctaaattggttatggcggagccggaagctcaccgagaccctttggccatgcaacagttctttgcagagtatggagtcacaacgacgcatttcgtcccatcgatgttagccgcgttcgtagcatcattgacgccacaaactgcgagacagtcatgtgccacacttaagcaagtcttctgctctggtgaggcccttcctgcggacctatgtcgggaatggcaacagcttactggagcccccttgcacaatctttacgggccgactgaggccgcagttgacgtatcgtggtatccagcgttcggggaggagctagcccaagtgcgagggtctagtgttccaattggatacccggtgtggaacacagggttaaggatcctcgacgccatgatgcatccggtaccaccaggtgtcgctggggatttgtacctgactggcattcaactggcacagggttatctagggcggcctgacttaacagctagccgattcatagcagatccattcgctcccggagagcggatgtaccgaacaggcgacgtggcacgctggttagataatggcgctgtcgagtatcttgggcggtcagacgatcagttaaagatacgtggacaacggattgagcttggtgaaatagaccgagttatgcaggcactaccagatgtcgagcaagccgtagcctcttgtgccattgcgcgagaagacattcccgggaacaagcacttggttgcgtacatagtgccgcaagaggagcagacctgcacagagcggtcacgttcaactctcacagtttccttcgtccgttctttcttaaaggagaaactaccagaatatatggtaccgtccgcgatcgtgatattagacgctctgccactcacgccaaatggaaagttggatagaagagctctgcctgctcctgacttgcactcgcaactcctggataaatacgttgctcccagaaacccaatagagactattatcgcggcagcattctcttcattgcttggatgcgacgtccaagatgcggacgcagatttctttgcgctcgggggccatagtctattggccatgaagctcgcagcgcaattgtcgagacaggtagcacggcaagtaacgcccgggcaagtcatggtcgcctcgacagtcgcgaaactcgcgaccattatcgacgctgagacatccggggaagataaccctatccccctatgtcaaggcgatggggaggagatgagcacatggctacgtcgttttggacccccagtcgaacatcgggccaggctagtgtgtttcccccacgcaggcgcagcggcggattcatacttagacctagcaagagcgttagcaccagagatcgatgttcatgctgttcaataccccggcaggcaagacagaagggacgaggagccattaggaaccgcaggtgaaattgcagatgaagtggcagcggtgctacgtgcgtcgggaggggatgggccttttgcacttttcggccacagtatgggcgccctcatcgcgtacgagacagcaaggcgattagagagggaaccgggagggggacccttacgtttattcgtgagcggacaaacagcgccacgtgtccatgaacgaagaactgatctgcccggtgacgatggactcgtggacgagcttaggcgacttggcacctccgaggcagcgctcgcagacgaagccctgctggctatgtctctcccggtgctcagggcggattatagggtgttaagatcctacgcttgggcggatggtcccccactacgcgccggtataactgccctctgcggtgatgcagacccactaactgcaacaggggatgcggaacgctggttacaacattccgtgattccgggtcggacacggacatttcccggtgggcatttttatttaggggaacaagtgaccgaggtggcaggggctgtccgtagagatttactgagagcagggttagcgggttga

SEQ ID NO: 30 - DNA, 13293 bp, Artificial Sequence
  MSH
atgaacccaccctgcgggccagtccgtgcgaattgcgtacacatatccatagatttccccatgccagtttccaaagtttccggtcctcgatcaaggacaaccagccggaggacacccgtccggattggggccgtggtggtggcaagctcgactagcgaactccttgatgggctcgcagcggttgctgatggtaggccacacgccagcgtagttaggggcgttgcgcgcccttctgcgccggttgtattcgttttcccaggtcaaggagcgcaatgggctgggatggcgggggagctactcggggagagtcgggtctttgcagccgctatggacgcctgcgcgagggcgttcgaacctgtaaccgattggacattggcccaagttttggattcaccagagcaatcccggcgtgtagaggtcgtccaacccgccctttttgcagtgcagacctctttggctgcactctggagatctttcggcgtgacacccgacgcagtcgtagggcactctatcggggagcttgcggcggcgcacgtctgtggggcagccggggcagctgacgcggcaagagctgccgcactgtggtcacgagaaatgatcccactagtggggaacggtgacatggcggcggttgcactctcggcagatgagattgaaccacggatcgcccgttgggacgacgacgtcgtgcttgctggtgttaatggtccccgctcggttttactaaccggcagccctgaaccagtagcaagaagggtacaagaactttcggcagagggagttcgggcacaggtcattaatgtgagcatggcggcccattccgcgcaggtggacgatattgcagaagggatgagatcggctctggcgtggtttgccccaggcgggtccgaagttccattttacgccagcctcactgggggagccgtggacacgcgagaactcgttgcggattactggcgacgctcattcagactgcccgttcgtttcgatgaagctataagatcagccctggaagttgggccaggtacattcgtcgaggcctcaccccacccagtcctggcggctgccctacagcagacactggacgcagaggggtcgtcggcagcggtggtccccacattacagcgggggcaaggcggaatgcgtcggttcctcttggcagcggcacaggcattcactggaggagtggccgtcgattggaccgcggcctatgatgatgtggggcctaacccggccctatgtcgatcgtctcggcgcccaagacggaaaacttcgcgaccgtcaccagcttcgacgggaacaagacatagaacttgctgcgaacggctgctcgccgtcgtgaacggcgaaactgccgcattagccggacgtgaagcagatgcagaggcaacctttcgagagcttgggttagattccgttctggcggcccagctcagagctaaagtatccgcggcgataggtcgagaagtcaatattgcactactctatgaccacccaaccccgagagcactcgcagaggcacttgctgtgccggttgagcagccatttgtgcatagccctgaagatcgctatcaaccgttcgcgctgaccgacgtacagcaagcctacctggtggggcgtcagccgggatttgccctgggcggtgttggctctcatttcttcgtcgaattcgagattgcagatttagacttgacccgcctggaaacggtttggaaccgtttaatagcacgccacgatatgttgcgtgctattgtacgtgacggtcagcaacaggtgctggaacagaccccgccatgggtgatcccggcgcatactctgcacacaccagaagaggcattacgagttagagaaaaactggctcatcaggtcttaaaccctgaagtctggcccgtatttgatctgcaagtgggctatgttgacggtatgccggcacgtctttggctctgcctagataatctattattggacgggctgagtatgcagattcttctcgccgaactggagcacggatatcgttaccctcaacagctactgcctcccctgccagttacctttcgtgattacttgcaacagccgagccttcagtctccgaacccagacagcctggcatggtggcaggctcaactggatgacatcccgccagcaccggctctcccactgcgttgtctgccacaggaagtggagactcctcgattcgcacggcttaatggcgctctcgattcaacacgttggcatcgtctgaaaaagcgcgcggccgacgcgcacctgactccgtcggccgtgttattgagtgtttggtccacagtcctgtcagcatggtcggctcagccggaatttactttaaacttgacacttttcgatcgtcgccctctgcatccccagattaatcaaatcttgggcgattttacctcacttatgcttctctcgtggcatccgggtgaatcctggctgcacagcgcgcagtctctgcaacagcgcttaagtcaaaacttgaatcaccgtgatgtttccgccattcgcgtcatgcggcagctggcgcaacagcaaaatgtcccggccgtacctatgcccgtggttttcacctctgcgctgggctttgaacaggataacttcctggcccggcgaaatctactgaaaccggtatggggtattagccagacgccgcaagtctggctggatcatcagatctatgaatctgagggcgaactgcgttttaactgggatttcgttgcagctctgtttccggcgggtcaggtggagcgtcagttcgaacaatactgcgcattattgaatcgcatggctgaggatgaaagcgggtggcagctcccgctggcggccctggtgcctcccgttaaacatgcgggtcagtgcgccgagcgcagcccgcgtgtttgtccagaacagtctcaaccgcacatcgcagctgatgaaagtactgtttccctgatatgtgacgcatttcgtgaggtcgtaggggaaagtgtgaccccggctgagaactttttcgaagcgggagccacgtccttaaatttggtacagctgcatgtgcttctccaacgtcacgaattttcaaccctgacgctactggatttattcacgcacccgtcgccagcggcccttgcggactatctcgcgggtgtcgccaccgtagaaaaaacgaagaggcctcggcccgtgagaaggcgtcagcgccggatccagcacttgcccttagtagctgcgcaacctggaatatggatggccgagaagttatctgaactaccatcagcgtggagcgtagcgcattacgtggagctcactggtgaggttgactcgcctcttttggccagggcggtagtggctggccttgcacaagctgacaccttaagaatgcgtttcacagaggataatggggaagtttggcaatgggtagacgatgcgttaacatttgagttaccggaaatcatagacctgcgcactaacatagaccctcacgggacagctcaggccttgatgcaagcggacctgcaacaggacctacgtgtggattcggggaagcctctggtcttccatcagctaattcaagtagcggacaatcgctggtactggtatcaaaggtaccaccacttgcttgtggacgggttcagttttccagcgataaccaggcaaatagccaacatttattgcacttggttgcgaggagagcctacgcccgcatcccccttcacgccattcgcagacgttgttgaggaataccaacagtatcgcgagagcgaagcgtggcaacgcgatgcggcattctgggcggagcaacgacggcaactaccgcctcccgcatccctatcacctgccccgctccccggccggtccgcgtcagccgacattctacggctaaagctggagttcacagatggtgaatttcgacagcttgctacacaactcagcggggtacaaaggacagacctagcgctcgctctggctgcattatggctaggacgactttgcaatcgaatggactacgcggcgggtttcatatttatgcgccggctcggcagcgcagcgttgaccgcaacgggtccagttttaaatgttcttcctttgggaatccacataggcaacccaagcttctctgagcttctcaccagggttcgcgaggtcgccttaggcgcgtatgcacaccaacatattccttttgagatgttagtagaggcactgcaaccagagcgaaaccttagccatactcctctcttccaagtgatgtttgtccttcagaatgcgcccgcgtcccaattagagttaaccgggatcaccgcaaacccaattaaggttaaatcaactaccacgaagttcgacctaactttaatcatgcaaaacacagctagcggattagtaggtgtttgggagtacaacacggatttattcgacgcgtcaacgattgagcgaatgacagggcactttgtaaccctcctcgagggcgttatcgccaatccacaacagccgatctctcaacttcctattttaactacagtggagcaacagcaacttttagtcgagtggaataacacgcaaaccgactaccccgctgataagtgtatacatcaattattcgaggaacaggtcgagcgcacaccagacgccgttgctgtcgtctttgggaatcagcaactcagctatcgagagatgcgcgaacaagtggttgcactcgccaatttattacgtgagcggggagtcaagccaggagactccgttgccgtggccttaccacgctctgttttcttaacccttgcactacacgcgattgtcgaggcaggtgccgcctggctacctcttgacacaggatatcctgacgatagattaaaaatgatgctcgaggatgcacggccttcccttctgatcacaacagacgatcaattaccccgcttcagtgacgtacctaatctgacctcactctgttacaacgctcccttgacgcctcaagggagcgcccctttacagctgtctcaacctcaccatactgcatatatcatctttacaagtggttctacgggacgccccaagggagtaatggttggtcagactgcgattgtaaatcgtctgttgtggatgcaaaaccactaccctttgacgggggaggacgttgtagcccaaaagactccttgctcgttcgatgtctcagtctgggagttcttttggccatttatagcaggggccaaattagttatggcggagccggaagcccaccgagacccacttgcgatgcagcaattctttgctgagtatggtgtcaccactacacatttcgtcccatcgatgttagcggccttcgtggcttctcttactccacaaacggctaggcaatcttgtgccacactaaagcaagtcttctgctccggcgaggcattacctgcagacttgtgccgggaatggcagcaactcacaggagctccattgcacaatctatacggaccgaccgaggccgcagtagacgtatcttggtatcctgcgtttggcgaggagttagcgcaagtaagaggttcgtcagtaccaataggataccccgtatggaacacggggcttcggatactggacgcgatgatgcatccggtcccaccaggagtcgcgggcgatttatacctgactgggatacagctggcccaaggttacctagggagacctgaccttacggcgtcgaggttcatagcggatccgtttgctccgggtgagcgcatgtaccgtacgggcgacgtcgcgcgatggctagataatggcgccgtagagtatcttggtagatcagacgatcagttaaagatacggggacaacgaatagagcttggggaaatagaccgggtaatgcaggctttgccagatgtcgagcaagcggtggcttcgtgtgctattgcgcgggaggacatacctgggaacaaacaccttgtagcgtacatagttcctcaagaggagcaaacatgcactgagcgatcgaggtccacacttacagtttcgttcgtccggagtttccttaaggagaaactccccgaatatatggtaccgagcgcaatagtgattctagacgctctccccctgactcctaatggaaagctagaccggcgggcgttacccgcccctgacctgcactcacaacttgagacaattattgctgcggctttctcgagcctgctcgggtgcgacgtacaagacgcggatgctgactttttcgcgctaggtggccattcgctgcttgccatgaagctagccgctcagctttcccgacaagtagcgcggcaggtgacaccaggccaagttatggtagcttcgactgtcgcaaagctcgcaacgatcatagacgcggagttagataaatacgtcgctccaaggaacccgatacctggaattggggcgctagttcccgctcccgtggtaatcgcagcaggccgtacggaggaaccaattgccatagtatccatggcttgccggttacccggtggtgtgaataccccacagagactatgggaattattacgtgaagggggagaaaccctcagtggcttccctaccgaccgagggtgggacctcgcgaggttgcatcacccagacccagacaaccccggtacgtcatacgttgataaagggggattcctggacgatgcggcagggtttgacgcagaatttttcggtgtgagccccagagaagcagcggctatggacccgcagcagagattactcctcgaaaccagctgggagttagtcgagaatgcagggattgatccacatagcctaagggggaccgccactggtgtcttcctcggcgttgccaagtttgggtatggcgaggatacggcagctgccgaagacgtcgaggggtactctgtcactggtgtagccccggcagtggcgtcgggcagaattagttacacgatggggttggaagggccgtctatttcggttgataccgcctgttcctccagtctggttgcactccaccttgcagtcgagtcgctccggaaaggagaaagcagtatggccgtggtcgggggagcggcggtgatggccacaccgggtgtgtttgtggatttttcccgacagagagccttggccgcggatgggcgttcaaaggcgttcggagcaggtgcagacgggtttggatttagcgaaggtgtgacactggttctcctagaaagattaagtgaagcccggcgtaacggccatgaggtgctggcagttgttagaggttccgcattaaaccaggacggggcttcgaacgggctgagcgccccctcgggcccggcacagagaagagtgatacgccaagcactcgaatcgtgtggcctagaaccaggtgacgttgacgcggtggaagcgcacgggacaggaactgcgttaggggacccgatagaagcaaacgccttgctggacacttatggtagagatcgtgatgcggatcgacccctctggttaggaagtgttaagtcaaatataggacacactcaggcagcggcgggagtaactgggctgctcaaagtagtcctagccttacgcaatggggaactacccgccaccctacatgtcgaggaaccgacaccgcatgtggattggtcgagcgggggagttgctctcttggcgggtaatcagccgtggcgaagaggtgaacgaacccgtagagccgccgtgtccgcattcgggatcagtggtacgaacgcgcacgtgattgtggaagaagctccacaagaggtgagaccagcgcccggtcaaggactctcgcccgcggtgtcaaccttggtagtggcgggtaaaactatgcagcgtgtttcggcaaccgccggtatgctcgcagattggatggaaggcccaggtgcagatgtggcgctggcggacgtggcgcacacgttaaatcatcaccgttcacggcaaccaaagttcggtacggtggtggccagggaccggacacaggcaatcgccggactaagagcgctggcggcgggtcagcacgccccaggggttgttaaccctgctgaaggaagtccaggtccagggacggtgttcgtgtttcctggccaggggtcccagcgtgcaggcatgggggaggagttggctgcggctttccccgtgtttgccagaatccaccagcaagtgtgggatttactcgatgttcctgatctcgacgttaacgaaacggggtacgcacaaccagcactcttcgcactccaagtggcgctgtttgggctcctcgaatcatggggagtacggccggatgccgtggtcgggcatagtgtaggggaattagcggcagggtacgtttccgggctttggagtcttgaggatgcttgcacgctcgtgtcggcgagagcccgtctaatgcaagccttaccggcaggtggtgttatggcggcagttccagtgtccgaagacgaagcacgggctgtgttgggggaaggagtcgaaatagctgcggtcaacggtccgtcgagcgtggttctaagcggtgatgaagcagcagtgctccaggccgcggaagggttaggcaagtggacgcgattaccgacctcgcatgcattccattctgctcgtatggaaccaatgctggaagagtttagagcagtggcggaaggtctaacatacaggactccccaggtggcaatggccgccggagaccaggttatgaccgctgaatactgggtgcgtcaggttagggatacagttcgttttggcgagcaagttgcctcgttcgaggatgctgtattcgtggaattgggagcagatcgctctcttgcacggctagtcgatggtatcgcgatgttgcacggggatcatgaggcacaggctggtatgcggagagaacaacccttgcccttaggtttacgaagattgctaaccgacctgcataacgctggtgctgccgtcgattttagtgttttgtgcccacaaggtcgtctggttgacgcaccgttaccagcctggtcacaccggtttctcttctatgaccgggaaggagtggacaatagatcaccagggggaagcacagtggcggtccacccgcttttactagccgcggtggatgtgccgggccacggtggagcggttttcacgggtagactctcgactgacgagcaaccgtggttagcggagcacgttgtcgggggaagaaccctagttcctggttctgttttagtcgatctagccttagcggcaggcgaagacgtagggctaccggtgttagaagaattagtattgcagaggccgctggtgcttgccggcgcgggagcactcctacggatgtcggtcggggcaccagacgagagcggtagaagaactatcgatgttcacgcagctgaagacgtcgccgatttagcagatgcccaatggtcccagcacgccaccgggactttagcccaaggggtagcggcggggcccagggacacagagcaatggcccccagaggatgccgtccggattccattagacgaccattatgatggtctcgcggaacagggttatgagtacggtccgtcgtttcaggcgctagtggcctacgtggcggaggatgcgactgcgacaatgttagcggaagtcgcgcttccgggcagcattagatcgcaacaaggtctatacgccatccatcccgcactgctggacgcttgttttcaatctgtcggagcccacccagacagtcaatccgtcgggtcaggtctactcgtacccctcggtgttcggagagttcgtgcgtacgcacccgtaaggaccgcccgttattgttacacccgcgtcacgaaagttgaactagctggggttgaggccgacatcgacgttctggatgctcacggcacagtgcttctagccgtgtgcggtcttcgtatcgggaccggagtgagcgagagggacaaacacaacagagttctcaatgagcgcctactcaccatcgaatggcatcagcgtgaactaccagaaatggacccctcgggtgccgggaagtggctcctaatctcggactgtgcagcatccgatgtcaccgctacacgactggctgatgccttccgggagcacagcgctgcgtgcactaccatgcggtggccacttcacgatgatcaactagcagccgccgaccaactccgggaccaggtgggttcagatgagttttctggcgtggtagtactaacagggccaaacacagggacccctcatcagggttccgcagaccgtggcgccgagtacgttaggcggttagttggaatcgctcgtgaacttagcgatcttcccggagcggttccccgtatgtatgtcgtcacaaggggagcgcagagagtccttgccgatgattgtgttaatttagaacagggagggctcagaggtctgctgaggaccatcggtgctgagcacccacatctccgcgccacccaaattgatgttgatgagcagacaggagtagagcagctggcgcgacaactcctagctacatcggaggaagacgagacagcctggagggacaacgaatggtacgttgcgaggttatgccccacacccctgaggccacaggaacgtaggacaatagtggcggaccatcaacagtctggtatgcggttacaaatacgtacgcccggtgcaatcgatagtgtggcctttgaacccgcacccgatgtagagcaacccttacgggcgggtgaagttcgggttgacgttagagcaaccggtgttaatttccgtgacgttctactcgctctcgggatgtatccccagaaagctgacatggggacagaagcagctggtgttgtaacagcagtgggacctgatgtcgatgcgtttgcgcctggtgatagagttctagggctattccaaggggcatttgctccaattgcggtgactgaccatcgtttactggcacgggtgccagacgggtggtcagatgccgatgcggcggcggtgccaatagcttacacgacagcacattatgcgctgcacgacctggcggggttgcgggcggggcaatctgtcctgatacacgcggcagcgggtggtgttggtatggccgctgttgcactggcacggagggccggcgcagaagttctggctaccgcaggacctgcaaaacacggtacgctacgggcattagggctagatgatgaacacatcgcttcgagtcgggagaccgggttcgcgcgtaagttccgagagcggactgggggacgaggagtggacgtcgttctaaacagcttgaccggcgaactattagacgagtccgcggatctcctcgcggaggacggagtcttcgtggaaatgggaaagactgatctgcgcgatgcaggggactttcgtgggcgctacgccccgtttgatctaggggaagcaggcgatgacaggctcggggaaattctacgtgaggtggtgggactgctcggtgcaggggaactcgaccgactccctgttagcgcgtgggaattggggataccccagacggggaagtcgttagtgacgctgccacccgaacaagcgcaagttttcagaccagacggcactgtattgatcaccgggggaacgggaacgttaggtcggctgctggcccgtcatctggttacagagcacggggtgcgtcacctgctgctagtgtcgaggagaggagcagatgcccctggatcggacgagctgagggccgaaatcgaggatctcggagcatcagcggaaattgcagcatgtgatacagccgatcgagacgctctcagcgcgttgctagatggactgccgaggccactgaccggagtagttcacgccgcgggagtcctcgctgacggtctggttacatccatcgacgagcccgcagtcgaacaagttctccgtgcaaaagttgatgcggcctggaacctgcacgagctaactgcgaacaccggtctcagctttttcgtgctgttctcgtcagccgcaagtgtgttagcggggccggggcagggagtatatgcggcagcgaacgaatctttaaacgctctggccgctctgcgtaggactaggggtttacccgcaaaagcattgggatggggattatgggcgatagggcgtgcaatagcatttgccgagcagaccggtgacgcaatcgccccggaggaaggcgcgtacgccttcgagacactactcagacataacagggcgtactcgggttacgctcccgtgatagggtcaccatggctgactgcgttcgcccaacattcgccctttgcggagaagttccagtccctggggcaaaatagatccgggacgtctaagtttctggcagaattagtcgatctgccaagagaagaatggccagatcggttacgtcgtctattagaactggtgaggtctcatgctgccgcagtttcggggtatggatcggcagaccaattaccagaaagaaaagcattcaaagacctcggattcgattcactggcagcagtcgaactaagaaatcgtctagggaccgcgacaggcgtccggctgcccagtactctggtgttcgaccacccaaccccacttgcggttgcggaacatctacgtgatcgtctaacatccggggaagataaccctatccccctatgtcaaggcgatggggaggagatgagcacatggctacgtcgttttggacccccagtcgaacatcgggccaggctagtgtgtttcccccacgcaggcgcagcggcggattcatacttagacctagcaagagcgttagcaccagagatcgatgttcatgctgttcaataccccggcaggcaagacagaagggacgaggagccattaggaaccgcaggtgaaattgcagatgaagtggcagcggtgctacgtgcgtcgggaggggatgggccttttgcacttttcggccacagtatgggcgccctcatcgcgtacgagacagcaaggcgattagagagggaaccgggagggggacccttacgtttattcgtgagcggacaaacagcgccacgtgtccatgaacgaagaactgatctgcccggtgacgatggactcgtggacgagcttaggcgacttggcacctccgaggcagcgctcgcagacgaagccctgctggctatgtctctcccggtgctcagggcggattatagggtgttaagatcctacgcttgggcggatggtcccccactacgcgccggtataactgccctctgcggtgatgcagacccactaactgcaacaggggatgcggaacgctggttacaacattccgtgattccgggtcggacacggacatttcccggtgggcatttttatttaggggaacaagtgaccgaggtggcaggggctgtccgtagagatttactgagagcagggttagcgggttga

SEQ ID NO: 31 - DNA, 11640 bp, Artificial Sequence
  MSO
atgaacccaccctgcgggccagtccgtgcgaattgcgtacacatatccatagatttccccatgccagtttccaaagtttccggtcctcgatcaaggacaaccagccggaggacacccgtccggattggggccgtggtggtggcaagctcgactagcgaactccttgatgggctcgcagcggttgctgatggtaggccacacgccagcgtagttaggggcgttgcgcgcccttctgcgccggttgtattcgttttcccaggtcaaggagcgcaatgggctgggatggcgggggagctactcggggagagtcgggtctttgcagccgctatggacgcctgcgcgagggcgttcgaacctgtaaccgattggacattggcccaagttttggattcaccagagcaatcccggcgtgtagaggtcgtccaacccgccctttttgcagtgcagacctctttggctgcactctggagatctttcggcgtgacacccgacgcagtcgtagggcactctatcggggagcttgcggcggcgcacgtctgtggggcagccggggcagctgacgcggcaagagctgccgcactgtggtcacgagaaatgatcccactagtggggaacggtgacatggcggcggttgcactctcggcagatgagattgaaccacggatcgcccgttgggacgacgacgtcgtgcttgctggtgttaatggtccccgctcggttttactaaccggcagccctgaaccagtagcaagaagggtacaagaactttcggcagagggagttcgggcacaggtcattaatgtgagcatggcggcccattccgcgcaggtggacgatattgcagaagggatgagatcggctctggcgtggtttgccccaggcgggtccgaagttccattttacgccagcctcactgggggagccgtggacacgcgagaactcgttgcggattactggcgacgctcattcagactgcccgttcgtttcgatgaagctataagatcagccctggaagttgggccaggtacattcgtcgaggcctcaccccacccagtcctggcggctgccctacagcagacactggacgcagaggggtcgtcggcagcggtggtccccacattacagcgggggcaaggcggaatgcgtcggttcctcttggcagcggcacaggcattcactggaggagtggccgtcgattggaccgcggcctatgatgatgtggggcctaacccggccctatgtcgatcgtctcggcgcccaagacggaaaacttcgcgaccgtcaccagcttcgacgggaacaagacatagaacttgctgcgaacggctgctcgccgtcgtgaacggcgaaactgccgcattagccggacgtgaagcagatgcagaggcaacctttcgagagcttgggttagattccgttctggcggcccagctcagagctaaagtatccgcggcgataggtcgagaagtcaatattgcactactctatgaccacccaaccccgagagcactcgcagaggcacttgctgtgccggttgagcagccatttgtgcatagccctgaagatcgctatcaaccgttcgcgctgaccgacgtacagcaagcctacctggtggggcgtcagccgggatttgccctgggcggtgttggctctcatttcttcgtcgaattcgagattgcagatttagacttgacccgcctggaaacggtttggaaccgtttaatagcacgccacgatatgttgcgtgctattgtacgtgacggtcagcaacaggtgctggaacagaccccgccatgggtgatcccggcgcatactctgcacacaccagaagaggcattacgagttagagaaaaactggctcatcaggtcttaaaccctgaagtctggcccgtatttgatctgcaagtgggctatgttgacggtatgccggcacgtctttggctctgcctagataatctattattggacgggctgagtatgcagattcttctcgccgaactggagcacggatatcgttaccctcaacagctactgcctcccctgccagttacctttcgtgattacttgcaacagccgagccttcagtctccgaacccagacagcctggcatggtggcaggctcaactggatgacatcccgccagcaccggctctcccactgcgttgtctgccacaggaagtggagactcctcgattcgcacggcttaatggcgctctcgattcaacacgttggcatcgtctgaaaaagcgcgcggccgacgcgcacctgactccgtcggccgtgttattgagtgtttggtccacagtcctgtcagcatggtcggctcagccggaatttactttaaacttgacacttttcgatcgtcgccctctgcatccccagattaatcaaatcttgggcgattttacctcacttatgcttctctcgtggcatccgggtgaatcctggctgcacagcgcgcagtctctgcaacagcgcttaagtcaaaacttgaatcaccgtgatgtttccgccattcgcgtcatgcggcagctggcgcaacagcaaaatgtcccggccgtacctatgcccgtggttttcacctctgcgctgggctttgaacaggataacttcctggcccggcgaaatctactgaaaccggtatggggtattagccagacgccgcaagtctggctggatcatcagatctatgaatctgagggcgaactgcgttttaactgggatttcgttgcagctctgtttccggcgggtcaggtggagcgtcagttcgaacaatactgcgcattattgaatcgcatggctgaggatgaaagcgggtggcagctcccgctggcggccctggtgcctcccgttaaacatgcgggtcagtgcgccgagcgcagcccgcgtgtttgtccagaacagtctcaaccgcacatcgcagctgatgaaagtactgtttccctgatatgtgacgcatttcgtgaggtcgtaggggaaagtgtgaccccggctgagaactttttcgaagcgggagccacgtccttaaatttggtacagctgcatgtgcttctccaacgtcacgaattttcaaccctgacgctactggatttattcacgcacccgtcgccagcggcccttgcggactatctcgcgggtgtcgccaccgtagaaaaaacgaagaggcctcggcccgtgagaaggcgtcagcgccggatccagcacttgcccttagtagctgcgcaacctggaatatggatggccgagaagttatctgaactaccatcagcgtggagcgtagcgcattacgtggagctcactggtgaggttgactcgcctcttttggccagggcggtagtggctggccttgcacaagctgacaccttaagaatgcgtttcacagaggataatggggaagtttggcaatgggtagacgatgcgttaacatttgagttaccggaaatcatagacctgcgcactaacatagaccctcacgggacagctcaggccttgatgcaagcggacctgcaacaggacctacgtgtggattcggggaagcctctggtcttccatcagctaattcaagtagcggacaatcgctggtactggtatcaaaggtaccaccacttgcttgtggacgggttcagttttccagcgataaccaggcaaatagccaacatttattgcacttggttgcgaggagagcctacgcccgcatcccccttcacgccattcgcagacgttgttgaggaataccaacagtatcgcgagagcgaagcgtggcaacgcgatgcggcattctgggcggagcaacgacggcaactaccgcctcccgcatccctatcacctgccccgctccccggccggtccgcgtcagccgacattctacggctaaagctggagttcacagatggtgaatttcgacagcttgctacacaactcagcggggtacaaaggacagacctagcgctcgctctggctgcattatggctaggacgactttgcaatcgaatggactacgcggcgggtttcatatttatgcgccggctcggcagcgcagcgttgaccgcaacgggtccagttttaaatgttcttcctttgggaatccacataggcaacccaagcttctctgagcttctcaccagggttcgcgaggtcgccttaggcgcgtatgcacaccaacatattccttttgagatgttagtagaggcactgcaaccagagcgaaaccttagccatactcctctcttccaagtgatgtttgtccttcagaatgcgcccgcgtcccaattagagttaaccgggatcaccgcaaacccaattaaggttaaatcaactaccacgaagttcgacctaactttaatcatgcaaaacacagctagcggattagtaggtgtttgggagtacaacacggatttattcgacgcgtcaacgattgagcgaatgacagggcactttgtaaccctcctcgagggcgttatcgccaatccacaacagccgatctctcaacttcctattttaactacagtggagcaacagcaacttttagtcgagtggaataacacgcaaaccgactaccccgctgataagtgtatacatcaattattcgaggaacaggtcgagcgcacaccagacgccgttgctgtcgtctttgggaatcagcaactcagctatcgagagatgcgcgaacaagtggttgcactcgccaatttattacgtgagcggggagtcaagccaggagactccgttgccgtggccttaccacgctctgttttcttaacccttgcactacacgcgattgtcgaggcaggtgccgcctggctacctcttgacacaggatatcctgacgatagattaaaaatgatgctcgaggatgcacggccttcccttctgatcacaacagacgatcaattaccccgcttcagtgacgtacctaatctgacctcactctgttacaacgctcccttgacgcctcaagggagcgcccctttacagctgtctcaacctcaccatactgcatatatcatctttacaagtggttctacgggacgccccaagggagtaatggttggtcagactgcgattgtaaatcgtctgttgtggatgcaaaaccactaccctttgacgggggaggacgttgtagcccaaaagactccttgctcgttcgatgtctcagtctgggagttcttttggccatttatagcaggggccaaattagttatggcggagccggaagcccaccgagacccacttgcgatgcagcaattctttgctgagtatggtgtcaccactacacatttcgtcccatcgatgttagcggccttcgtggcttctcttactccacaaacggctaggcaatcttgtgccacactaaagcaagtcttctgctccggcgaggcattacctgcagacttgtgccgggaatggcagcaactcacaggagctccattgcacaatctatacggaccgaccgaggccgcagtagacgtatcttggtatcctgcgtttggcgaggagttagcgcaagtaagaggttcgtcagtaccaataggataccccgtatggaacacggggcttcggatactggacgcgatgatgcatccggtcccaccaggagtcgcgggcgatttatacctgactgggatacagctggcccaaggttacctagggagacctgaccttacggcgtcgaggttcatagcggatccgtttgctccgggtgagcgcatgtaccgtacgggcgacgtcgcgcgatggctagataatggcgccgtagagtatcttggtagatcagacgatcagttaaagatacggggacaacgaatagagcttggggaaatagaccgggtaatgcaggctttgccagatgtcgagcaagcggtggcttcgtgtgctattgcgcgggaggacatacctgggaacaaacaccttgtagcgtacatagttcctcaagaggagcaaacatgcactgagcgatcgaggtccacacttacagtttcgttcgtccggagtttccttaaggagaaactccccgaatatatggtaccgagcgcaatagtgattctagacgctctccccctgactcctaatggaaagctagaccggcgggcgttacccgcccctgacctgcactcacaacttgagacaattattgctgcggctttctcgagcctgctcgggtgcgacgtacaagacgcggatgctgactttttcgcgctaggtggccattcgctgcttgccatgaagctagccgctcagctttcccgacaagtagcgcggcaggtgacaccaggccaagttatggtagcttcgactgtcgcaaagctcgcaacgatcatagacgcggagttagataaatacgtcgctccaaggaacccgatacctggaattggggcgctagttcccgctcccgtggtaatcgcagcaggccgtacggaggaaccaattgccatcgtttcgatggcatgtcgtttaccgggaggagtcaatacgccccaacggctctgggaattactacgggagggtggtgaaaccttgtccgggttcccaacggaccgtggctgggacctagcacggcttcaccaccctgatccggacaaccccggaacgagctacgttgataagggtggatttctcgacgacgcggcgggtttcgacgcagagtttttcggggtttcaccaagggaagctgccgctatggaccctcagcaacgattacttttagagacctcgtgggagctagttgaaaatgcgggcatagatccacatagcctgcgagggacagcgacaggggtgttcctaggagttgcgaagtttggttatggtgaggacacagcagcagcggaagatgttgaaggttattcagttaccggtgttgctcccgctgtggcatctggccgcatatcctacactatgggtttagaaggtccttccatctcggtcgataccgcatgctcaagctcgctagtcgcgcttcatctagccgtagagtccctccgaaagggtgagtcatctatggcggtggtgggtggtgcagccgttatggcgactcctggggtatttgttgatttttcacgccaacgggcgcttgccgcagacggccgttccaaagcgttcggggcaggtgcagatggttttggtttcagcgagggagtcacgctggttctactagagcgtttaagtgaggcgcgtcgtaacggtcatgaagttctagctgtagtgcgcgggtccgcgttaaaccaggacggagcgagcaacggactttcagcaccctccggccctgcgcaacgtagagtaataaggcaagcgctcgaatcgtgtgggcttgaaccgggggatgttgacgcggttgaggcgcatggtactggtacagcactaggtgacccaatagaggccaatgcgctgttggacacttacgggcgagaccgtgatgcggatcgtccactttggttggggtccgttaagagcaatattgggcacactcaagctgcggccggggttacaggactgctgaaggttgtgttagcactgcgcaatggtgagctacctgcaacgttacatgtcgaggaaccaactccacacgtcgattggtcctcaggtggtgtcgcattactggcgggtaatcaaccatggcgaaggggagaaaggaccagaagggcggcagtgagcgcctttggtatctccggtacaaatgctcacgtgatagtggaagaggcgcctcaggaagttcgacccgcccctggccaagggctgtcgccagccgtgtccacgttagttgttgcaggtaaaaccatgcagcgtgtaagtgcgacagctggaatgcttgcagactggatggagggtcctggggccgatgttgcattggcggatgtggcccataccctgaaccatcaccgatcaagacagcccaagttcgggacggttgtagcgcgtgacaggactcaggcgatagctgggctccgtgcattggcggctggtcaacatgctcctggggtcgtcaacccagctgaaggttccccaggaccaggcaccgtgttcgtttttcccggtcaaggttcgcagagggcagggatgggggaggaactcgcggcagcctttcctgtcttcgctcgaatacatcagcaagtttgggacctcctagatgttcccgacctcgacgttaatgaaaccgggtacgcccaaccagcgctgttcgcgcttcaggtcgcgctctttggccttctggagtcgtggggtgttaggccagatgcagtggtagggcactcagttggtgagctggccgcggggtacgtgtccggtctttggtcactagaggacgcctgcacactagtctcagcaagagcgcgcctaatgcaggcactgcctgctggaggggtgatggcggcagtccccgtctccgaggatgaggcgcgggccgtcctgggcgagggagttgaaattgcggctgtgaatggaccctcgtccgttgtgctctcaggggacgaggcggcagtcttacaggccgccgaaggtctaggtaagtggacgcgactgccgaccagccatgcttttcactcagcgagaatggaacccatgctagaagagtttcgggccgtagcagagggtctgacctatcgtacccctcaagtagctatggctgctggggatcaggtgatgacagcagaatattgggtgcggcaggttcgggacacagttcgcttcggggagcaagtagcgtcattcgaggatgcggtgtttgttgagttaggcgctgacagaagtctagcgcgtttggtggacggcatcgccatgctgcacggtgaccacgaagcgcaggccgcggaccataggcaaatcaccgaagcggttgcggatgcttacgtcttaggccaccttccggattttgcggcgctgcggcggcctcacgcacgaaagttggacttaccaacttatcccttcgagcgtagacagtactggttcagagatgcgcgtgagaggccggaacaacccagagataccggcggacctcgcacagaagcagtccgtctgttagaggatggtaggattgaagaattagctgcacttttgggaggggccagtgatgaccaacacacattacaggtgctgactaagttggcggcgcaacataaccaacaacgaacaacccggtcaatcgctgacgacaggtacgaaataaggtgggaccgatcgacttccccactatccggagcagatgttgaccaagcggggagctggatcgtggtgtcagatgacgcagatgccgttcccccgctagtggacttgctggctgcacgtaacgagccccatcaggttgttggtctacccgcttcggacgcagacgaggagaggctcgcagagactctgcgtgcggctgcgactgaagatgctacccttcggatagtccacgttgcggcgctcgaagcaggcgctacccccagcatgcgttcactgctccgcatgcagcaccgaatactaggtggcacgcggcgggtgttcagggcagcggtcgcagcggagttaagaggtcccatttggatagtgacgcggggagcacaaagagtggctgacaccgatacagttgccccgcatcagtcatgcctctggggatttgggagggcagcatcgctggagctgccgcacgtttggggtggcctagcagatttatcagagggcggtgacaatgcggccgatgagtggagtgcgctagtggaccgcattgccgcaccccacggttcagcagttagggaggaccaactggcgctgagagacagggccgtatatacgccaagactggccagacgttctgcgcccccgagcgggactcccctacatctacgaggggatggcacagtgttaataacaggtgggactggtacactaggtaggctattagcgcgtcacctagtaacagagcatggggtgcggcatctcttactagtttcaaggagaggcgccgatgcccctggctcggatgaactgcgcgcagaaatagaggacttaggtgccagcgcggagatcgcagcgtgtgatacagcggatcgcgatgccctatctgccctactagatggtctcccccggccccttacgggtgtcgttcacgccgctggcgtgttagccgatggacttgtcactagcattgacgagcctgcggtggaacaggttctccgagcaaaggtggacgcggcatggaacctacacgaactcacagctaataccgggctatcctttttcgttcttttctcatcagcagcatcggtcctggcaggtccagggcaaggagtttatgcggctgcaaatgaatcgctcaacgcactagctgcgttaaggcgaactaggggtctgccggccaaggctctgggatggggcctgtgggccatcgggcgggcaatcgcttttgcggagcagaccggggacgccatcgctccagaggaaggagcatacgcttttgaaactctgttaaggcataaccgtgcctactcgggatatgcgcccgtcattggatctccctggttgaccgcgttcgcacagcattccccctttgcagaaaaattccaatcactcggacagaatcggtcagggacatcgaaattcttagcggagctagttgacctgcctcgtgaggaatggccggataggctcaggagactactagagttagttaggtcccatgccgccgcggtctccggttacggtagtgcagatcaactgccggaaagaaaagcgttcaaggatttggggtttgattcgctggccgccgttgaactgcgtaaccggctgggaacggctacaggggtacgactgccgtcaaccctagtatttgatcacccaactccgctggccgtcgctgagcacttaagagataggctaacatccggggaagataaccctatccccctatgtcaaggcgatggggaggagatgagcacatggctacgtcgttttggacccccagtcgaacatcgggccaggctagtgtgtttcccccacgcaggcgcagcggcggattcatacttagacctagcaagagcgttagcaccagagatcgatgttcatgctgttcaataccccggcaggcaagacagaagggacgaggagccattaggaaccgcaggtgaaattgcagatgaagtggcagcggtgctacgtgcgtcgggaggggatgggccttttgcacttttcggccacagtatgggcgccctcatcgcgtacgagacagcaaggcgattagagagggaaccgggagggggacccttacgtttattcgtgagcggacaaacagcgccacgtgtccatgaacgaagaactgatctgcccggtgacgatggactcgtggacgagcttaggcgacttggcacctccgaggcagcgctcgcagacgaagccctgctggctatgtctctcccggtgctcagggcggattatagggtgttaagatcctacgcttgggcggatggtcccccactacgcgccggtataactgccctctgcggtgatgcagacccactaactgcaacaggggatgcggaacgctggttacaacattccgtgattccgggtcggacacggacatttcccggtgggcatttttatttaggggaacaagtgaccgaggtggcaggggctgtccgtagagatttactgagagcagggttagcgggttga

SEQ ID NO: 32 - DNA, 11979 bp, Artificial Sequence
  MSS
atgaacccaccctgcgggccagtccgtgcgaattgcgtacacatatccatagatttccccatgccagtttccaaagtttccggtcctcgatcaaggacaaccagccggaggacacccgtccggattggggccgtggtggtggcaagctcgactagcgaactccttgatgggctcgcagcggttgctgatggtaggccacacgccagcgtagttaggggcgttgcgcgcccttctgcgccggttgtattcgttttcccaggtcaaggagcgcaatgggctgggatggcgggggagctactcggggagagtcgggtctttgcagccgctatggacgcctgcgcgagggcgttcgaacctgtaaccgattggacattggcccaagttttggattcaccagagcaatcccggcgtgtagaggtcgtccaacccgccctttttgcagtgcagacctctttggctgcactctggagatctttcggcgtgacacccgacgcagtcgtagggcactctatcggggagcttgcggcggcgcacgtctgtggggcagccggggcagctgacgcggcaagagctgccgcactgtggtcacgagaaatgatcccactagtggggaacggtgacatggcggcggttgcactctcggcagatgagattgaaccacggatcgcccgttgggacgacgacgtcgtgcttgctggtgttaatggtccccgctcggttttactaaccggcagccctgaaccagtagcaagaagggtacaagaactttcggcagagggagttcgggcacaggtcattaatgtgagcatggcggcccattccgcgcaggtggacgatattgcagaagggatgagatcggctctggcgtggtttgccccaggcgggtccgaagttccattttacgccagcctcactgggggagccgtggacacgcgagaactcgttgcggattactggcgacgctcattcagactgcccgttcgtttcgatgaagctataagatcagccctggaagttgggccaggtacattcgtcgaggcctcaccccacccagtcctggcggctgccctacagcagacactggacgcagaggggtcgtcggcagcggtggtccccacattacagcgggggcaaggcggaatgcgtcggttcctcttggcagcggcacaggcattcactggaggagtggccgtcgattggaccgcggcctatgatgatgtggggcctaacccggccctatgtcgatcgtctcggcgcccaagacggaaaacttcgcgaccgtcaccagcttcgacgggaacaagacatagaacttgctgcgaacggctgctcgccgtcgtgaacggcgaaactgccgcattagccggacgtgaagcagatgcagaggcaacctttcgagagcttgggttagattccgttctggcggcccagctcagagctaaagtatccgcggcgataggtcgagaagtcaatattgcactactctatgaccacccaaccccgagagcactcgcagaggcacttgctgtgccggttgagcagccatttgtgcatagccctgaagatcgctatcaaccgttcgcgctgaccgacgtacagcaagcctacctggtggggcgtcagccgggatttgccctgggcggtgttggctctcatttcttcgtcgaattcgagattgcagatttagacttgacccgcctggaaacggtttggaaccgtttaatagcacgccacgatatgttgcgtgctattgtacgtgacggtcagcaacaggtgctggaacagaccccgccatgggtgatcccggcgcatactctgcacacaccagaagaggcattacgagttagagaaaaactggctcatcaggtcttaaaccctgaagtctggcccgtatttgatctgcaagtgggctatgttgacggtatgccggcacgtctttggctctgcctagataatctattattggacgggctgagtatgcagattcttctcgccgaactggagcacggatatcgttaccctcaacagctactgcctcccctgccagttacctttcgtgattacttgcaacagccgagccttcagtctccgaacccagacagcctggcatggtggcaggctcaactggatgacatcccgccagcaccggctctcccactgcgttgtctgccacaggaagtggagactcctcgattcgcacggcttaatggcgctctcgattcaacacgttggcatcgtctgaaaaagcgcgcggccgacgcgcacctgactccgtcggccgtgttattgagtgtttggtccacagtcctgtcagcatggtcggctcagccggaatttactttaaacttgacacttttcgatcgtcgccctctgcatccccagattaatcaaatcttgggcgattttacctcacttatgcttctctcgtggcatccgggtgaatcctggctgcacagcgcgcagtctctgcaacagcgcttaagtcaaaacttgaatcaccgtgatgtttccgccattcgcgtcatgcggcagctggcgcaacagcaaaatgtcccggccgtacctatgcccgtggttttcacctctgcgctgggctttgaacaggataacttcctggcccggcgaaatctactgaaaccggtatggggtattagccagacgccgcaagtctggctggatcatcagatctatgaatctgagggcgaactgcgttttaactgggatttcgttgcagctctgtttccggcgggtcaggtggagcgtcagttcgaacaatactgcgcattattgaatcgcatggctgaggatgaaagcgggtggcagctcccgctggcggccctggtgcctcccgttaaacatgcgggtcagtgcgccgagcgcagcccgcgtgtttgtccagaacagtctcaaccgcacatcgcagctgatgaaagtactgtttccctgatatgtgacgcatttcgtgaggtcgtaggggaaagtgtgaccccggctgagaactttttcgaagcgggagccacgtccttaaatttggtacagctgcatgtgcttctccaacgtcacgaattttcaaccctgacgctactggatttattcacgcacccgtcgccagcggcccttgcggactatctcgcgggtgtcgccaccgtagaaaaaacgaagaggcctcggcccgtgagaaggcgtcagcgccggatccagcacttgcccttagtagctgcgcaacctggaatatggatggccgagaagttatctgaactaccatcagcgtggagcgtagcgcattacgtggagctcactggtgaggttgactcgcctcttttggccagggcggtagtggctggccttgcacaagctgacaccttaagaatgcgtttcacagaggataatggggaagtttggcaatgggtagacgatgcgttaacatttgagttaccggaaatcatagacctgcgcactaacatagaccctcacgggacagctcaggccttgatgcaagcggacctgcaacaggacctacgtgtggattcggggaagcctctggtcttccatcagctaattcaagtagcggacaatcgctggtactggtatcaaaggtaccaccacttgcttgtggacgggttcagttttccagcgataaccaggcaaatagccaacatttattgcacttggttgcgaggagagcctacgcccgcatcccccttcacgccattcgcagacgttgttgaggaataccaacagtatcgcgagagcgaagcgtggcaacgcgatgcggcattctgggcggagcaacgacggcaactaccgcctcccgcatccctatcacctgccccgctccccggccggtccgcgtcagccgacattctacggctaaagctggagttcacagatggtgaatttcgacagcttgctacacaactcagcggggtacaaaggacagacctagcgctcgctctggctgcattatggctaggacgactttgcaatcgaatggactacgcggcgggtttcatatttatgcgccggctcggcagcgcagcgttgaccgcaacgggtccagttttaaatgttcttcctttgggaatccacataggcaacccaagcttctctgagcttctcaccagggttcgcgaggtcgccttaggcgcgtatgcacaccaacatattccttttgagatgttagtagaggcactgcaaccagagcgaaaccttagccatactcctctcttccaagtgatgtttgtccttcagaatgcgcccgcgtcccaattagagttaaccgggatcaccgcaaacccaattaaggttaaatcaactaccacgaagttcgacctaactttaatcatgcaaaacacagctagcggattagtaggtgtttgggagtacaacacggatttattcgacgcgtcaacgattgagcgaatgacagggcactttgtaaccctcctcgagggcgttatcgccaatccacaacagccgatctctcaacttcctattttaactacagtggagcaacagcaacttttagtcgagtggaataacacgcaaaccgactaccccgctgataagtgtatacatcaattattcgaggaacaggtcgagcgcacaccagacgccgttgctgtcgtctttgggaatcagcaactcagctatcgagagatgcgcgaacaagtggttgcactcgccaatttattacgtgagcggggagtcaagccaggagactccgttgccgtggccttaccacgctctgttttcttaacccttgcactacacgcgattgtcgaggcaggtgccgcctggctacctcttgacacaggatatcctgacgatagattaaaaatgatgctcgaggatgcacggccttcccttctgatcacaacagacgatcaattaccccgcttcagtgacgtacctaatctgacctcactctgttacaacgctcccttgacgcctcaagggagcgcccctttacagctgtctcaacctcaccatactgcatatatcatctttacaagtggttctacgggacgccccaagggagtaatggttggtcagactgcgattgtaaatcgtctgttgtggatgcaaaaccactaccctttgacgggggaggacgttgtagcccaaaagactccttgctcgttcgatgtctcagtctgggagttcttttggccatttatagcaggggccaaattagttatggcggagccggaagcccaccgagacccacttgcgatgcagcaattctttgctgagtatggtgtcaccactacacatttcgtcccatcgatgttagcggccttcgtggcttctcttactccacaaacggctaggcaatcttgtgccacactaaagcaagtcttctgctccggcgaggcattacctgcagacttgtgccgggaatggcagcaactcacaggagctccattgcacaatctatacggaccgaccgaggccgcagtagacgtatcttggtatcctgcgtttggcgaggagttagcgcaagtaagaggttcgtcagtaccaataggataccccgtatggaacacggggcttcggatactggacgcgatgatgcatccggtcccaccaggagtcgcgggcgatttatacctgactgggatacagctggcccaaggttacctagggagacctgaccttacggcgtcgaggttcatagcggatccgtttgctccgggtgagcgcatgtaccgtacgggcgacgtcgcgcgatggctagataatggcgccgtagagtatcttggtagatcagacgatcagttaaagatacggggacaacgaatagagcttggggaaatagaccgggtaatgcaggctttgccagatgtcgagcaagcggtggcttcgtgtgctattgcgcgggaggacatacctgggaacaaacaccttgtagcgtacatagttcctcaagaggagcaaacatgcactgagcgatcgaggtccacacttacagtttcgttcgtccggagtttccttaaggagaaactccccgaatatatggtaccgagcgcaatagtgattctagacgctctccccctgactcctaatggaaagctagaccggcgggcgttacccgcccctgacctgcactcacaacttgagacaattattgctgcggctttctcgagcctgctcgggtgcgacgtacaagacgcggatgctgactttttcgcgctaggtggccattcgctgcttgccatgaagctagccgctcagctttcccgacaagtagcgcggcaggtgacaccaggccaagttatggtagcttcgactgtcgcaaagctcgcaacgatcatagacgcggagttagataaatacgtcgctccaaggaacccgatactgccagtagaacagccttttgtgcactcaccggaagagcggtatcgaccattcgcgttaacggatgttcagcaagcctacctggtcgggcgccagccgggatttgccctgggcggtgtaggctcgcatttcttcgtggaattcgagatcgcagatctcgacatacaccgcctggaaaaagtgtggaaccgtttaattgcacgtcatgatatgttgcgcgctgtggttcgtgacggtcagcaacgtgtactggaacagaccccgccatgggtcataccagcacatattcttcacagtcctgaagaggcattacaggttcgtgatcgtttagctcaccaagtgttgaaccccgaagtctggccggtatttgatctgcaggtgggcttcgttgacggtatgccggcccgtttatggttgtgccttgataacctgttattggacgggctgagcatgcagattcttctctctgaactggagcatggatatcgctacccacagcaactccctcccccgttgccgatcacttttcgcgattatcttcagcaaccggcactccgtaccccaaatcctgactcattggcttggtggcagacgcaactggatgacatcccacctgcgcccgccctcccgctacgttgtctgcctcaagatgttgaaaccccgcgtttcgcgcgtctgtacggcgcaatggattctgctcgttggcgtcgcctgaaacagcgtgcggccgacgcacatctgactccgtcagctgtcctactgagcgtatggtctacagtgctggcagcttggtcggcgcagccggattttactctcaacctgacattattcgaccggcgaccactgcaccctcagattaatcaaatccttggcgattttacctcactgatgttattgtcgtggcatccgggtgagagttggctgcagtccgcgcgtcttctccagcaacgcctttcagaatcgctcaaccaccgtgatgttagcgccattcgcgtcatgcggcagctggcgagaaggcaaaatgtcccggccgtacccatgccggtcgtatttacctctgcgctggggtttgaacaggataacttcctggcccgtcgcaatctactgaaaccggtgtggggtatcagtcagacgccgcaagtttggctggaccatcaggtctatgaatccgagggcgaactgcgttttaactgggatttcgttgcggccctgtttccggacggtcaagtggaacgtcagttcgcgcaatactgcgccttattgaatcgcatggcagaagatgacagctcttggcagttgccgcttgctgatctggtgcccccgttaaaagtgaccgagcggcgagcgagaaggctgcgtccagaacgcgcccagcctcgtattgcagctgataagagttccgttagtctgatctgtgacacttttcgtgaggtggttggggaacccgtggcaccggctgagaactttttcgaagcgggagccacatccctcaatctggttcagctgcatgtccttctccaacgtcacgaatttgcgaccttaacgctactggatttgttcacccatccaagccctgttgcattggctaactatcttgcgggtgtggccctggaagagaaaacgaagcgcgtgcggccggttcggcgaagacagcgtcgcattcagcacttgcccttagtagctgcgcaacctggaatatggatggccgagaagttatctgaactaccatcagcgtggagcgtagcgcattacgtggagctcactggtgaggttgactcgcctcttttggccagggcggtagtggctggccttgcacaagctgacaccttaagaatgcgtttcacagaggataatggggaagtttggcaatgggtagacgatgcgttaacatttgagttaccggaaatcatagacctgcgcactaacatagaccctcacgggacagctcaggccttgatgcaagcggacctgcaacaggacctacgtgtggattcggggaagcctctggtcttccatcagctaattcaagtagcggacaatcgctggtactggtatcaaaggtaccaccacttgcttgtggacgggttcagttttccagcgataaccaggcaaatagccaacatttattgcacttggttgcgaggagagcctacgcccgcatcccccttcacgccattcgcagacgttgttgaggaataccaacagtatcgcgagagcgaagcgtggcaacgcgatgcggcattctgggcggagcaacgacggcaactaccgcctcccgcatccctatcacctgccccgctccccggccggtccgcgtcagccgacattctacggctaaagctggagttcacagatggtgaatttcgacagcttgctacacaactcagcggggtacaaaggacagacctagcgctcgctctggctgcattatggctaggacgactttgcaatcgaatggactacgcggcgggtttcatatttatgcgccggctcggcagcgcagcgttgaccgcaacgggtccagttttaaatgttcttcctttgggaatccacataggcaacccaagcttctctgagcttctcaccagggttcgcgaggtcgccttaggcgcgtatgcacaccaacatattccttttgagatgttagtagaggcactgcaaccagagcgaaaccttagccatactcctctcttccaagtgatgtttgtccttcagaatgcgcccgcgtcccaattagagttaaccgggatcaccgcaaacccaattaaggttaaatcaactaccacgaagttcgacctaactttaatcatgcaaaacacagctagcggattagtaggtgtttgggagtacaacacggatttattcgacgcgtcaacgattgagcgaatgacagggcactttgtaaccctcctcgagggcgttatcgccaatccacaacagccgatctctcaacttcctattttaactacagtggagcaacagcaacttttagtcgagtggaataacacgcaaaccgactaccccgctgataagtgtatacatcaattattcgaggaacaggtcgagcgcacaccagacgccgttgctgtcgtctttgggaatcagcaactcagctatcgagagatgcgcgaacaagtggttgcactcgccaatttattacgtgagcggggagtcaagccaggagactccgttgccgtggccttaccacgctctgttttcttaacccttgcactacacgcgattgtcgaggcaggtgccgcctggctacctcttgacacaggatatcctgacgatagattaaaaatgatgctcgaggatgcacggccttcccttctgatcacaacagacgatcaattaccccgcttcagtgacgtacctaatctgacctcactctgttacaacgctcccttgacgcctcaagggagcgcccctttacagctgtctcaacctcaccatactgcatatatcatctttacaagtggttctacgggacgccccaagggagtaatggttggtcagactgcgattgtaaatcgtctgttgtggatgcaaaaccactaccctttgacgggggaggacgttgtagcccaaaagactccttgctcgttcgatgtctcagtctgggagttcttttggccatttatagcaggggccaaattagttatggcggagccggaagcccaccgagacccacttgcgatgcagcaattctttgctgagtatggtgtcaccactacacatttcgtcccatcgatgttagcggccttcgtggcttctcttactccacaaacggctaggcaatcttgtgccacactaaagcaagtcttctgctccggcgaggcattacctgcagacttgtgccgggaatggcagcaactcacaggagctccattgcacaatctatacggaccgaccgaggccgcagtagacgtatcttggtatcctgcgtttggcgaggagttagcgcaagtaagaggttcgtcagtaccaataggataccccgtatggaacacggggcttcggatactggacgcgatgatgcatccggtcccaccaggagtcgcgggcgatttatacctgactgggatacagctggcccaaggttacctagggagacctgaccttacggcgtcgaggttcatagcggatccgtttgctccgggtgagcgcatgtaccgtacgggcgacgtcgcgcgatggctagataatggcgccgtagagtatcttggtagatcagacgatcagttaaagatacggggacaacgaatagagcttggggaaatagaccgggtaatgcaggctttgccagatgtcgagcaagcggtggcttcgtgtgctattgcgcgggaggacatacctgggaacaaacaccttgtagcgtacatagttcctcaagaggagcaaacatgcactgagcgatcgaggtccacacttacagtttcgttcgtccggagtttccttaaggagaaactccccgaatatatggtaccgagcgcaatagtgattctagacgctctccccctgactcctaatggaaagctagaccggcgggcgttacccgcccctgacctgcactcacaacttgagacaattattgctgcggctttctcgagcctgctcgggtgcgacgtacaagacgcggatgctgactttttcgcgctaggtggccattcgctgcttgccatgaagctagccgctcagctttcccgacaagtagcgcggcaggtgacaccaggccaagttatggtagcttcgactgtcgcaaagctcgcaacgatcatagacgcggagttagataaatacgtcgctccaaggaacccgataacatccggggaagataaccctatccccctatgtcaaggcgatggggaggagatgagcacatggctacgtcgttttggacccccagtcgaacatcgggccaggctagtgtgtttcccccacgcaggcgcagcggcggattcatacttagacctagcaagagcgttagcaccagagatcgatgttcatgctgttcaataccccggcaggcaagacagaagggacgaggagccattaggaaccgcaggtgaaattgcagatgaagtggcagcggtgctacgtgcgtcgggaggggatgggccttttgcacttttcggccacagtatgggcgccctcatcgcgtacgagacagcaaggcgattagagagggaaccgggagggggacccttacgtttattcgtgagcggacaaacagcgccacgtgtccatgaacgaagaactgatctgcccggtgacgatggactcgtggacgagcttaggcgacttggcacctccgaggcagcgctcgcagacgaagccctgctggctatgtctctcccggtgctcagggcggattatagggtgttaagatcctacgcttgggcggatggtcccccactacgcgccggtataactgccctctgcggtgatgcagacccactaactgcaacaggggatgcggaacgctggttacaacattccgtgattccgggtcggacacggacatttcccggtgggcatttttatttaggggaacaagtgaccgaggtggcaggggctgtccgtagagatttactgagagcagggttagcgggttga

SEQ ID NO: 33 - protein, 4090 aa, Artificial Sequence
  ICC
MVAKHSLENGVFHKMTENEKELILHFNNTKTDYPKNKTLHELFEEQAMKTPDHTALVFGAQRMTYRELNEKANQTARLLREKGIGRGSIAAIIADRSFEMIIGIIGILKAGGAYLPIDPETPKDRIAFMLSDTKAAVLLTQGKAADGIDCEADIVQLDREASDGFSKEPLSSVNDSGDTAYIIYTSGSTGTPKGVITPHYSVIRVVQNTNYIDITEDNVILQLSNYSFDGSVFDIFGALLNGASLVMIEKEALLNINRLGSAINEEKVSVMFITTALFNMIADIHVDCLSNLRKILFGGERASIPHVRKVLNHVGRDKLIHVYGPTESTVYATYYFINEIDDEAETIPIGSPLANTSVLIMDEAGKLVPIGVPGELCIAGDGLSKGYLNREELTAEKFIPHPFIPGERLYKTGDLAKWLPDGNIEFIGRIDHQVKIRGFRIELGEIESRLEMHEDINETIVTVREDEESRPYICAYITANREISLDELKGFLGEKLPEYMIPAYFVKLDKLPLTKNGKVDRKALPEPDRTAGAENEYEAPRNETEEKLAAVWQDVLHVEKAGIHDHFAQMGGHSLHAMELIAKIKEKMNVEIPLHQLFKLATIKELSAFIEANVPVEQPFVHSPEDRYQPFALTDVQQAYLVGRQPGFALGGVGSHFFVEFEIADLDLTRLETVWNRLIARHDMLRAIVRDGQQQVLEQTPPWVIPAHTLHTPEEALRVREKLAHQVLNPEVWPVFDLQVGYVDGMPARLWLCLDNLLLDGLSMQILLAELEHGYRYPQQLLPPLPVTFRDYLQQPSLQSPNPDSLAWWQAQLDDIPPAPALPLRCLPQEVETPRFARLNGALDSTRWHRLKKRAADAHLTPSAVLLSVWSTVLSAWSAQPEFTLNLTLFDRRPLHPQINQILGDFTSLMLLSWHPGESWLHSAQSLQQRLSQNLNHRDVSAIRVMRQLAQQQNVPAVPMPVVFTSALGFEQDNFLARRNLLKPVWGISQTPQVWLDHQIYESEGELRFNWDFVAALFPAGQVERQFEQYCALLNRMAEDESGWQLPLAALVPPVKHAGQCAERSPRVCPEQSQPHIAADESTVSLICDAFREVVGESVTPAENFFEAGATSLNLVQLHVLLQRHEFSTLTLLDLFTHPSPAALADYLAGVATVEKTKRPRPVRRRQRRIGEPFPLAPMQHAMWVGRHDHQQLGGVAGHLYVEFDGARVDPDRLRAAATRLALRHPMLRVQFLPDGTQRIPPAAGSRDFPISVADLRHVAPDVVDQRLAGIRDAKSHQQLDGAVFELALTLLPGERTRLHVDLDMQAADAMSYRILLADLAALYDGREPPALGYTYREYRQAIEAEETLPQPVRDADRDWWAQRIPQLPDPPALPTRAGGERDRRRSTRRWHWLDPQTRDALFARARARGITPAMTLAAAFANVLARWSASSRFLLNLPLFSRQALHPDVDLLVGDFTSSLLLDVDLGDTVSNLARKNQLTFTEDWEHRHWSGVELLRELKRQQRYPHGAPVVFTSNLGRSLYSSRAESPLGEPEWGISQTPQVWIDHLAFEHHGEVWLQWDSNDALFPPALVETLFDAYCQLINQLCDDESAWQKPFADMMPASQRAIRERVNATGAPIPEGLLHEGIFRIALQQPQALAVTDMRYQWNSYREMREQVVALANLLRERGVKPGDSVAVALPRSVFLTLALHAIVEAGAAWLPLDTGYPDDRLKMMLEDARPSLLITTDDQLPRFSDVPNLTSLCYNAPLTPQGSAPLQLSQPHHTAYIIFTSGSTGRPKGVMVGQTAIVNRLLWMQNHYPLTGEDVVAQKTPCSFDVSVWEFFWPFIAGAKLVMAEPEAHRDPLAMQQFFAEYGVTTTHFVPSMLAAFVASLTPQTARQSCATLKQVFCSGEALPADLCREWQQLTGAPLHNLYGPTEAAVDVSWYPAFGEELAQVRGSSVPIGYPVWNTGLRILDAMMHPVPPGVAGDLYLTGIQLAQGYLGRPDLTASRFIADPFAPGERMYRTGDVARWLDNGAVEYLGRSDDQLKIRGQRIELGEIDRVMQALPDVEQAVASCAIAREDIPGNKHLVAYIVPQEEQTCTERSRSTLTVSFVRSFLKEKLPEYMVPSAIVILDALPLTPNGKLDRRALPAPDLHSQLLDKYVAPRNPIETIIAAAFSSLLGCDVQDADADFFALGGHSLLAMKLAAQLSRQVARQVTPGQVMVASTVAKLATIIDAELPVEQPFVHSPEERYRPFALTDVQQAYLVGRQPGFALGGVGSHFFVEFEIADLDIHRLEKVWNRLIARHDMLRAVVRDGQQRVLEQTPPWVIPAHILHSPEEALQVRDRLAHQVLNPEVWPVFDLQVGFVDGMPARLWLCLDNLLLDGLSMQILLSELEHGYRYPQQLPPPLPITFRDYLQQPALRTPNPDSLAWWQTQLDDIPPAPALPLRCLPQDVETPRFARLYGAMDSARWRRLKQRAADAHLTPSAVLLSVWSTVLAAWSAQPDFTLNLTLFDRRPLHPQINQILGDFTSLMLLSWHPGESWLQSARLLQQRLSESLNHRDVSAIRVMRQLARRQNVPAVPMPVVFTSALGFEQDNFLARRNLLKPVWGISQTPQVWLDHQVYESEGELRFNWDFVAALFPDGQVERQFAQYCALLNRMAEDDSSWQLPLADLVPPLKVTERRARRLRPERAQPRIAADKSSVSLICDTFREVVGEPVAPAENFFEAGATSLNLVQLHVLLQRHEFATLTLLDLFTHPSPVALANYLAGVALEEKTKRVRPVRRRQRRIGEPFPLAPMQHAMWVGRHDHQQLGGVAGHLYVEFDGARVDPDRLRAAATRLALRHPMLRVQFLPDGTQRIPPAAGSRDFPISVADLRHVAPDVVDQRLAGIRDAKSHQQLDGAVFELALTLLPGERTRLHVDLDMQAADAMSYRILLADLAALYDGREPPALGYTYREYRQAIEAEETLPQPVRDADRDWWAQRIPQLPDPPALPTRAGGERDRRRSTRRWHWLDPQTRDALFARARARGITPAMTLAAAFANVLARWSASSRFLLNLPLFSRQALHPDVDLLVGDFTSSLLLDVDLGDTVSNLARKNQLTFTEDWEHRHWSGVELLRELKRQQRYPHGAPVVFTSNLGRSLYSSRAESPLGEPEWGISQTPQVWIDHLAFEHHGEVWLQWDSNDALFPPALVETLFDAYCQLINQLCDDESAWQKPFADMMPASQRAIRERVNATGAPIPEGLLHEGIFRIALQQPQALAVTDMRYQWNSYREMREQVVALANLLRERGVKPGDSVAVALPRSVFLTLALHAIVEAGAAWLPLDTGYPDDRLKMMLEDARPSLLITTDDQLPRFSDVPNLTSLCYNAPLTPQGSAPLQLSQPHHTAYIIFTSGSTGRPKGVMVGQTAIVNRLLWMQNHYPLTGEDVVAQKTPCSFDVSVWEFFWPFIAGAKLVMAEPEAHRDPLAMQQFFAEYGVTTTHFVPSMLAAFVASLTPQTARQSCATLKQVFCSGEALPADLCREWQQLTGAPLHNLYGPTEAAVDVSWYPAFGEELAQVRGSSVPIGYPVWNTGLRILDAMMHPVPPGVAGDLYLTGIQLAQGYLGRPDLTASRFIADPFAPGERMYRTGDVARWLDNGAVEYLGRSDDQLKIRGQRIELGEIDRVMQALPDVEQAVASCAIAREDIPGNKHLVAYIVPQEEQTCTERSRSTLTVSFVRSFLKEKLPEYMVPSAIVILDALPLTPNGKLDRRALPAPDLHSQLLDKYVAPRNPIETIIAAAFSSLLGCDVQDADADFFALGGHSLLAMKLAAQLSRQVARQVTPGQVMVASTVAKLATIIDAETSGEDNPIPLCQGDGEEMSTWLRRFGPPVEHRARLVCFPHAGAAADSYLDLARALAPEIDVHAVQYPGRQDRRDEEPLGTAGEIADEVAAVLRASGGDGPFALFGHSMGALIAYETARRLEREPGGGPLRLFVSGQTAPRVHERRTDLPGDDGLVDELRRLGTSEAALADEALLAMSLPVLRADYRVLRSYAWADGPPLRAGITALCGDADPLTATGDAERWLQHSVIPGRTRTFPGGHFYLGEQVTEVAGAVRRDLLRAGLAG

SEQ ID NO: 34 - protein, 4531 aa, Artificial Sequence
  ICH
MVAKHSLENGVFHKMTENEKELILHFNNTKTDYPKNKTLHELFEEQAMKTPDHTALVFGAQRMTYRELNEKANQTARLLREKGIGRGSIAAIIADRSFEMIIGIIGILKAGGAYLPIDPETPKDRIAFMLSDTKAAVLLTQGKAADGIDCEADIVQLDREASDGFSKEPLSSVNDSGDTAYIIYTSGSTGTPKGVITPHYSVIRVVQNTNYIDITEDNVILQLSNYSFDGSVFDIFGALLNGASLVMIEKEALLNINRLGSAINEEKVSVMFITTALFNMIADIHVDCLSNLRKILFGGERASIPHVRKVLNHVGRDKLIHVYGPTESTVYATYYFINEIDDEAETIPIGSPLANTSVLIMDEAGKLVPIGVPGELCIAGDGLSKGYLNREELTAEKFIPHPFIPGERLYKTGDLAKWLPDGNIEFIGRIDHQVKIRGFRIELGEIESRLEMHEDINETIVTVREDEESRPYICAYITANREISLDELKGFLGEKLPEYMIPAYFVKLDKLPLTKNGKVDRKALPEPDRTAGAENEYEAPRNETEEKLAAVWQDVLHVEKAGIHDHFAQMGGHSLHAMELIAKIKEKMNVEIPLHQLFKLATIKELSAFIEANVPVEQPFVHSPEDRYQPFALTDVQQAYLVGRQPGFALGGVGSHFFVEFEIADLDLTRLETVWNRLIARHDMLRAIVRDGQQQVLEQTPPWVIPAHTLHTPEEALRVREKLAHQVLNPEVWPVFDLQVGYVDGMPARLWLCLDNLLLDGLSMQILLAELEHGYRYPQQLLPPLPVTFRDYLQQPSLQSPNPDSLAWWQAQLDDIPPAPALPLRCLPQEVETPRFARLNGALDSTRWHRLKKRAADAHLTPSAVLLSVWSTVLSAWSAQPEFTLNLTLFDRRPLHPQINQILGDFTSLMLLSWHPGESWLHSAQSLQQRLSQNLNHRDVSAIRVMRQLAQQQNVPAVPMPVVFTSALGFEQDNFLARRNLLKPVWGISQTPQVWLDHQIYESEGELRFNWDFVAALFPAGQVERQFEQYCALLNRMAEDESGWQLPLAALVPPVKHAGQCAERSPRVCPEQSQPHIAADESTVSLICDAFREVVGESVTPAENFFEAGATSLNLVQLHVLLQRHEFSTLTLLDLFTHPSPAALADYLAGVATVEKTKRPRPVRRRQRRIGEPFPLAPMQHAMWVGRHDHQQLGGVAGHLYVEFDGARVDPDRLRAAATRLALRHPMLRVQFLPDGTQRIPPAAGSRDFPISVADLRHVAPDVVDQRLAGIRDAKSHQQLDGAVFELALTLLPGERTRLHVDLDMQAADAMSYRILLADLAALYDGREPPALGYTYREYRQAIEAEETLPQPVRDADRDWWAQRIPQLPDPPALPTRAGGERDRRRSTRRWHWLDPQTRDALFARARARGITPAMTLAAAFANVLARWSASSRFLLNLPLFSRQALHPDVDLLVGDFTSSLLLDVDLGDTVSNLARKNQLTFTEDWEHRHWSGVELLRELKRQQRYPHGAPVVFTSNLGRSLYSSRAESPLGEPEWGISQTPQVWIDHLAFEHHGEVWLQWDSNDALFPPALVETLFDAYCQLINQLCDDESAWQKPFADMMPASQRAIRERVNATGAPIPEGLLHEGIFRIALQQPQALAVTDMRYQWNSYREMREQVVALANLLRERGVKPGDSVAVALPRSVFLTLALHAIVEAGAAWLPLDTGYPDDRLKMMLEDARPSLLITTDDQLPRFSDVPNLTSLCYNAPLTPQGSAPLQLSQPHHTAYIIFTSGSTGRPKGVMVGQTAIVNRLLWMQNHYPLTGEDVVAQKTPCSFDVSVWEFFWPFIAGAKLVMAEPEAHRDPLAMQQFFAEYGVTTTHFVPSMLAAFVASLTPQTARQSCATLKQVFCSGEALPADLCREWQQLTGAPLHNLYGPTEAAVDVSWYPAFGEELAQVRGSSVPIGYPVWNTGLRILDAMMHPVPPGVAGDLYLTGIQLAQGYLGRPDLTASRFIADPFAPGERMYRTGDVARWLDNGAVEYLGRSDDQLKIRGQRIELGEIDRVMQALPDVEQAVASCAIAREDIPGNKHLVAYIVPQEEQTCTERSRSTLTVSFVRSFLKEKLPEYMVPSAIVILDALPLTPNGKLDRRALPAPDLHSQLLDKYVAPRNPIETIIAAAFSSLLGCDVQDADADFFALGGHSLLAMKLAAQLSRQVARQVTPGQVMVASTVAKLATIIDAEPGIGALVPAPVVIAAGRTEEPIAIVSMACRLPGGVNTPQRLWELLREGGETLSGFPTDRGWDLARLHHPDPDNPGTSYVDKGGFLDDAAGFDAEFFGVSPREAAAMDPQQRLLLETSWELVENAGIDPHSLRGTATGVFLGVAKFGYGEDTAAAEDVEGYSVTGVAPAVASGRISYTMGLEGPSISVDTACSSSLVALHLAVESLRKGESSMAVVGGAAVMATPGVFVDFSRQRALAADGRSKAFGAGADGFGFSEGVTLVLLERLSEARRNGHEVLAVVRGSALNQDGASNGLSAPSGPAQRRVIRQALESCGLEPGDVDAVEAHGTGTALGDPIEANALLDTYGRDRDADRPLWLGSVKSNIGHTQAAAGVTGLLKVVLALRNGELPATLHVEEPTPHVDWSSGGVALLAGNQPWRRGERTRRAAVSAFGISGTNAHVIVEEAPQEVRPAPGQGLSPAVSTLVVAGKTMQRVSATAGMLADWMEGPGADVALADVAHTLNHHRSRQPKFGTVVARDRTQAIAGLRALAAGQHAPGVVNPAEGSPGPGTVFVFPGQGSQRAGMGEELAAAFPVFARIHQQVWDLLDVPDLDVNETGYAQPALFALQVALFGLLESWGVRPDAVVGHSVGELAAGYVSGLWSLEDACTLVSARARLMQALPAGGVMAAVPVSEDEARAVLGEGVEIAAVNGPSSVVLSGDEAAVLQAAEGLGKWTRLPTSHAFHSARMEPMLEEFRAVAEGLTYRTPQVAMAAGDQVMTAEYWVRQVRDTVRFGEQVASFEDAVFVELGADRSLARLVDGIAMLHGDHEAQAGMRREQPLPLGLRRLLTDLHNAGAAVDFSVLCPQGRLVDAPLPAWSHRFLFYDREGVDNRSPGGSTVAVHPLLLAAVDVPGHGGAVFTGRLSTDEQPWLAEHVVGGRTLVPGSVLVDLALAAGEDVGLPVLEELVLQRPLVLAGAGALLRMSVGAPDESGRRTIDVHAAEDVADLADAQWSQHATGTLAQGVAAGPRDTEQWPPEDAVRIPLDDHYDGLAEQGYEYGPSFQALVAYVAEDATATMLAEVALPGSIRSQQGLYAIHPALLDACFQSVGAHPDSQSVGSGLLVPLGVRRVRAYAPVRTARYCYTRVTKVELAGVEADIDVLDAHGTVLLAVCGLRIGTGVSERDKHNRVLNERLLTIEWHQRELPEMDPSGAGKWLLISDCAASDVTATRLADAFREHSAACTTMRWPLHDDQLAAADQLRDQVGSDEFSGVVVLTGPNTGTPHQGSADRGAEYVRRLVGIARELSDLPGAVPRMYVVTRGAQRVLADDCVNLEQGGLRGLLRTIGAEHPHLRATQIDVDEQTGVEQLARQLLATSEEDETAWRDNEWYVARLCPTPLRPQERRTIVADHQQSGMRLQIRTPGAIDSVAFEPAPDVEQPLRAGEVRVDVRATGVNFRDVLLALGMYPQKADMGTEAAGVVTAVGPDVDAFAPGDRVLGLFQGAFAPIAVTDHRLLARVPDGWSDADAAAVPIAYTTAHYALHDLAGLRAGQSVLIHAAAGGVGMAAVALARRAGAEVLATAGPAKHGTLRALGLDDEHIASSRETGFARKFRERTGGRGVDVVLNSLTGELLDESADLLAEDGVFVEMGKTDLRDAGDFRGRYAPFDLGEAGDDRLGEILREVVGLLGAGELDRLPVSAWELGIPQTGKSLVTLPPEQAQVFRPDGTVLITGGTGTLGRLLARHLVTEHGVRHLLLVSRRGADAPGSDELRAEIEDLGASAEIAACDTADRDALSALLDGLPRPLTGVVHAAGVLADGLVTSIDEPAVEQVLRAKVDAAWNLHELTANTGLSFFVLFSSAASVLAGPGQGVYAAANESLNALAALRRTRGLPAKALGWGLWAIGRAIAFAEQTGDAIAPEEGAYAFETLLRHNRAYSGYAPVIGSPWLTAFAQHSPFAEKFQSLGQNRSGTSKFLAELVDLPREEWPDRLRRLLELVRSHAAAVSGYGSADQLPERKAFKDLGFDSLAAVELRNRLGTATGVRLPSTLVFDHPTPLAVAEHLRDRLTSGEDNPIPLCQGDGEEMSTWLRRFGPPVEHRARLVCFPHAGAAADSYLDLARALAPEIDVHAVQYPGRQDRRDEEPLGTAGEIADEVAAVLRASGGDGPFALFGHSMGALIAYETARRLEREPGGGPLRLFVSGQTAPRVHERRTDLPGDDGLVDELRRLGTSEAALADEALLAMSLPVLRADYRVLRSYAWADGPPLRAGITALCGDADPLTATGDAERWLQHSVIPGRTRTFPGGHFYLGEQVTEVAGAVRRDLLRAGLAG

SEQ ID NO: 35 - protein, 3980 aa, Artificial Sequence
  ICO
MVAKHSLENGVFHKMTENEKELILHFNNTKTDYPKNKTLHELFEEQAMKTPDHTALVFGAQRMTYRELNEKANQTARLLREKGIGRGSIAAIIADRSFEMIIGIIGILKAGGAYLPIDPETPKDRIAFMLSDTKAAVLLTQGKAADGIDCEADIVQLDREASDGFSKEPLSSVNDSGDTAYIIYTSGSTGTPKGVITPHYSVIRVVQNTNYIDITEDNVILQLSNYSFDGSVFDIFGALLNGASLVMIEKEALLNINRLGSAINEEKVSVMFITTALFNMIADIHVDCLSNLRKILFGGERASIPHVRKVLNHVGRDKLIHVYGPTESTVYATYYFINEIDDEAETIPIGSPLANTSVLIMDEAGKLVPIGVPGELCIAGDGLSKGYLNREELTAEKFIPHPFIPGERLYKTGDLAKWLPDGNIEFIGRIDHQVKIRGFRIELGEIESRLEMHEDINETIVTVREDEESRPYICAYITANREISLDELKGFLGEKLPEYMIPAYFVKLDKLPLTKNGKVDRKALPEPDRTAGAENEYEAPRNETEEKLAAVWQDVLHVEKAGIHDHFAQMGGHSLHAMELIAKIKEKMNVEIPLHQLFKLATIKELSAFIEANVPVEQPFVHSPEDRYQPFALTDVQQAYLVGRQPGFALGGVGSHFFVEFEIADLDLTRLETVWNRLIARHDMLRAIVRDGQQQVLEQTPPWVIPAHTLHTPEEALRVREKLAHQVLNPEVWPVFDLQVGYVDGMPARLWLCLDNLLLDGLSMQILLAELEHGYRYPQQLLPPLPVTFRDYLQQPSLQSPNPDSLAWWQAQLDDIPPAPALPLRCLPQEVETPRFARLNGALDSTRWHRLKKRAADAHLTPSAVLLSVWSTVLSAWSAQPEFTLNLTLFDRRPLHPQINQILGDFTSLMLLSWHPGESWLHSAQSLQQRLSQNLNHRDVSAIRVMRQLAQQQNVPAVPMPVVFTSALGFEQDNFLARRNLLKPVWGISQTPQVWLDHQIYESEGELRFNWDFVAALFPAGQVERQFEQYCALLNRMAEDESGWQLPLAALVPPVKHAGQCAERSPRVCPEQSQPHIAADESTVSLICDAFREVVGESVTPAENFFEAGATSLNLVQLHVLLQRHEFSTLTLLDLFTHPSPAALADYLAGVATVEKTKRPRPVRRRQRRIGEPFPLAPMQHAMWVGRHDHQQLGGVAGHLYVEFDGARVDPDRLRAAATRLALRHPMLRVQFLPDGTQRIPPAAGSRDFPISVADLRHVAPDVVDQRLAGIRDAKSHQQLDGAVFELALTLLPGERTRLHVDLDMQAADAMSYRILLADLAALYDGREPPALGYTYREYRQAIEAEETLPQPVRDADRDWWAQRIPQLPDPPALPTRAGGERDRRRSTRRWHWLDPQTRDALFARARARGITPAMTLAAAFANVLARWSASSRFLLNLPLFSRQALHPDVDLLVGDFTSSLLLDVDLGDTVSNLARKNQLTFTEDWEHRHWSGVELLRELKRQQRYPHGAPVVFTSNLGRSLYSSRAESPLGEPEWGISQTPQVWIDHLAFEHHGEVWLQWDSNDALFPPALVETLFDAYCQLINQLCDDESAWQKPFADMMPASQRAIRERVNATGAPIPEGLLHEGIFRIALQQPQALAVTDMRYQWNSYREMREQVVALANLLRERGVKPGDSVAVALPRSVFLTLALHAIVEAGAAWLPLDTGYPDDRLKMMLEDARPSLLITTDDQLPRFSDVPNLTSLCYNAPLTPQGSAPLQLSQPHHTAYIIFTSGSTGRPKGVMVGQTAIVNRLLWMQNHYPLTGEDVVAQKTPCSFDVSVWEFFWPFIAGAKLVMAEPEAHRDPLAMQQFFAEYGVTTTHFVPSMLAAFVASLTPQTARQSCATLKQVFCSGEALPADLCREWQQLTGAPLHNLYGPTEAAVDVSWYPAFGEELAQVRGSSVPIGYPVWNTGLRILDAMMHPVPPGVAGDLYLTGIQLAQGYLGRPDLTASRFIADPFAPGERMYRTGDVARWLDNGAVEYLGRSDDQLKIRGQRIELGEIDRVMQALPDVEQAVASCAIAREDIPGNKHLVAYIVPQEEQTCTERSRSTLTVSFVRSFLKEKLPEYMVPSAIVILDALPLTPNGKLDRRALPAPDLHSQLLDKYVAPRNPIETIIAAAFSSLLGCDVQDADADFFALGGHSLLAMKLAAQLSRQVARQVTPGQVMVASTVAKLATIIDAEPGIGALVPAPVVIAAGRTEEPIAIVSMACRLPGGVNTPQRLWELLREGGETLSGFPTDRGWDLARLHHPDPDNPGTSYVDKGGFLDDAAGFDAEFFGVSPREAAAMDPQQRLLLETSWELVENAGIDPHSLRGTATGVFLGVAKFGYGEDTAAAEDVEGYSVTGVAPAVASGRISYTMGLEGPSISVDTACSSSLVALHLAVESLRKGESSMAVVGGAAVMATPGVFVDFSRQRALAADGRSKAFGAGADGFGFSEGVTLVLLERLSEARRNGHEVLAVVRGSALNQDGASNGLSAPSGPAQRRVIRQALESCGLEPGDVDAVEAHGTGTALGDPIEANALLDTYGRDRDADRPLWLGSVKSNIGHTQAAAGVTGLLKVVLALRNGELPATLHVEEPTPHVDWSSGGVALLAGNQPWRRGERTRRAAVSAFGISGTNAHVIVEEAPQEVRPAPGQGLSPAVSTLVVAGKTMQRVSATAGMLADWMEGPGADVALADVAHTLNHHRSRQPKFGTVVARDRTQAIAGLRALAAGQHAPGVVNPAEGSPGPGTVFVFPGQGSQRAGMGEELAAAFPVFARIHQQVWDLLDVPDLDVNETGYAQPALFALQVALFGLLESWGVRPDAVVGHSVGELAAGYVSGLWSLEDACTLVSARARLMQALPAGGVMAAVPVSEDEARAVLGEGVEIAAVNGPSSVVLSGDEAAVLQAAEGLGKWTRLPTSHAFHSARMEPMLEEFRAVAEGLTYRTPQVAMAAGDQVMTAEYWVRQVRDTVRFGEQVASFEDAVFVELGADRSLARLVDGIAMLHGDHEAQAADHRQITEAVADAYVLGHLPDFAALRRPHARKLDLPTYPFERRQYWFRDARERPEQPRDTGGPRTEAVRLLEDGRIEELAALLGGASDDQHTLQVLTKLAAQHNQQRTTRSIADDRYEIRWDRSTSPLSGADVDQAGSWIVVSDDADAVPPLVDLLAARNEPHQVVGLPASDADEERLAETLRAAATEDATLRIVHVAALEAGATPSMRSLLRMQHRILGGTRRVFRAAVAAELRGPIWIVTRGAQRVADTDTVAPHQSCLWGFGRAASLELPHVWGGLADLSEGGDNAADEWSALVDRIAAPHGSAVREDQLALRDRAVYTPRLARRSAPPSGTPLHLRGDGTVLITGGTGTLGRLLARHLVTEHGVRHLLLVSRRGADAPGSDELRAEIEDLGASAEIAACDTADRDALSALLDGLPRPLTGVVHAAGVLADGLVTSIDEPAVEQVLRAKVDAAWNLHELTANTGLSFFVLFSSAASVLAGPGQGVYAAANESLNALAALRRTRGLPAKALGWGLWAIGRAIAFAEQTGDAIAPEEGAYAFETLLRHNRAYSGYAPVIGSPWLTAFAQHSPFAEKFQSLGQNRSGTSKFLAELVDLPREEWPDRLRRLLELVRSHAAAVSGYGSADQLPERKAFKDLGFDSLAAVELRNRLGTATGVRLPSTLVFDHPTPLAVAEHLRDRLTSGEDNPIPLCQGDGEEMSTWLRRFGPPVEHRARLVCFPHAGAAADSYLDLARALAPEIDVHAVQYPGRQDRRDEEPLGTAGEIADEVAAVLRASGGDGPFALFGHSMGALIAYETARRLEREPGGGPLRLFVSGQTAPRVHERRTDLPGDDGLVDELRRLGTSEAALADEALLAMSLPVLRADYRVLRSYAWADGPPLRAGITALCGDADPLTATGDAERWLQHSVIPGRTRTFPGGHFYLGEQVTEVAGAVRRDLLRAGLAG

SEQ ID NO: 36 - protein, 4093 aa, Artificial Sequence
  ICS
MVAKHSLENGVFHKMTENEKELILHFNNTKTDYPKNKTLHELFEEQAMKTPDHTALVFGAQRMTYRELNEKANQTARLLREKGIGRGSIAAIIADRSFEMIIGIIGILKAGGAYLPIDPETPKDRIAFMLSDTKAAVLLTQGKAADGIDCEADIVQLDREASDGFSKEPLSSVNDSGDTAYIIYTSGSTGTPKGVITPHYSVIRVVQNTNYIDITEDNVILQLSNYSFDGSVFDIFGALLNGASLVMIEKEALLNINRLGSAINEEKVSVMFITTALFNMIADIHVDCLSNLRKILFGGERASIPHVRKVLNHVGRDKLIHVYGPTESTVYATYYFINEIDDEAETIPIGSPLANTSVLIMDEAGKLVPIGVPGELCIAGDGLSKGYLNREELTAEKFIPHPFIPGERLYKTGDLAKWLPDGNIEFIGRIDHQVKIRGFRIELGEIESRLEMHEDINETIVTVREDEESRPYICAYITANREISLDELKGFLGEKLPEYMIPAYFVKLDKLPLTKNGKVDRKALPEPDRTAGAENEYEAPRNETEEKLAAVWQDVLHVEKAGIHDHFAQMGGHSLHAMELIAKIKEKMNVEIPLHQLFKLATIKELSAFIEANVPVEQPFVHSPEDRYQPFALTDVQQAYLVGRQPGFALGGVGSHFFVEFEIADLDLTRLETVWNRLIARHDMLRAIVRDGQQQVLEQTPPWVIPAHTLHTPEEALRVREKLAHQVLNPEVWPVFDLQVGYVDGMPARLWLCLDNLLLDGLSMQILLAELEHGYRYPQQLLPPLPVTFRDYLQQPSLQSPNPDSLAWWQAQLDDIPPAPALPLRCLPQEVETPRFARLNGALDSTRWHRLKKRAADAHLTPSAVLLSVWSTVLSAWSAQPEFTLNLTLFDRRPLHPQINQILGDFTSLMLLSWHPGESWLHSAQSLQQRLSQNLNHRDVSAIRVMRQLAQQQNVPAVPMPVVFTSALGFEQDNFLARRNLLKPVWGISQTPQVWLDHQIYESEGELRFNWDFVAALFPAGQVERQFEQYCALLNRMAEDESGWQLPLAALVPPVKHAGQCAERSPRVCPEQSQPHIAADESTVSLICDAFREVVGESVTPAENFFEAGATSLNLVQLHVLLQRHEFSTLTLLDLFTHPSPAALADYLAGVATVEKTKRPRPVRRRQRRIGEPFPLAPMQHAMWVGRHDHQQLGGVAGHLYVEFDGARVDPDRLRAAATRLALRHPMLRVQFLPDGTQRIPPAAGSRDFPISVADLRHVAPDVVDQRLAGIRDAKSHQQLDGAVFELALTLLPGERTRLHVDLDMQAADAMSYRILLADLAALYDGREPPALGYTYREYRQAIEAEETLPQPVRDADRDWWAQRIPQLPDPPALPTRAGGERDRRRSTRRWHWLDPQTRDALFARARARGITPAMTLAAAFANVLARWSASSRFLLNLPLFSRQALHPDVDLLVGDFTSSLLLDVDLGDTVSNLARKNQLTFTEDWEHRHWSGVELLRELKRQQRYPHGAPVVFTSNLGRSLYSSRAESPLGEPEWGISQTPQVWIDHLAFEHHGEVWLQWDSNDALFPPALVETLFDAYCQLINQLCDDESAWQKPFADMMPASQRAIRERVNATGAPIPEGLLHEGIFRIALQQPQALAVTDMRYQWNSYREMREQVVALANLLRERGVKPGDSVAVALPRSVFLTLALHAIVEAGAAWLPLDTGYPDDRLKMMLEDARPSLLITTDDQLPRFSDVPNLTSLCYNAPLTPQGSAPLQLSQPHHTAYIIFTSGSTGRPKGVMVGQTAIVNRLLWMQNHYPLTGEDVVAQKTPCSFDVSVWEFFWPFIAGAKLVMAEPEAHRDPLAMQQFFAEYGVTTTHFVPSMLAAFVASLTPQTARQSCATLKQVFCSGEALPADLCREWQQLTGAPLHNLYGPTEAAVDVSWYPAFGEELAQVRGSSVPIGYPVWNTGLRILDAMMHPVPPGVAGDLYLTGIQLAQGYLGRPDLTASRFIADPFAPGERMYRTGDVARWLDNGAVEYLGRSDDQLKIRGQRIELGEIDRVMQALPDVEQAVASCAIAREDIPGNKHLVAYIVPQEEQTCTERSRSTLTVSFVRSFLKEKLPEYMVPSAIVILDALPLTPNGKLDRRALPAPDLHSQLLDKYVAPRNPIETIIAAAFSSLLGCDVQDADADFFALGGHSLLAMKLAAQLSRQVARQVTPGQVMVASTVAKLATIIDAELPVEQPFVHSPEERYRPFALTDVQQAYLVGRQPGFALGGVGSHFFVEFEIADLDIHRLEKVWNRLIARHDMLRAVVRDGQQRVLEQTPPWVIPAHILHSPEEALQVRDRLAHQVLNPEVWPVFDLQVGFVDGMPARLWLCLDNLLLDGLSMQILLSELEHGYRYPQQLPPPLPITFRDYLQQPALRTPNPDSLAWWQTQLDDIPPAPALPLRCLPQDVETPRFARLYGAMDSARWRRLKQRAADAHLTPSAVLLSVWSTVLAAWSAQPDFTLNLTLFDRRPLHPQINQILGDFTSLMLLSWHPGESWLQSARLLQQRLSESLNHRDVSAIRVMRQLARRQNVPAVPMPVVFTSALGFEQDNFLARRNLLKPVWGISQTPQVWLDHQVYESEGELRFNWDFVAALFPDGQVERQFAQYCALLNRMAEDDSSWQLPLADLVPPLKVTERRARRLRPERAQPRIAADKSSVSLICDTFREVVGEPVAPAENFFEAGATSLNLVQLHVLLQRHEFATLTLLDLFTHPSPVALANYLAGVALEEKTKRVRPVRRRQRRIQHLPLVAAQPGIWMAEKLSELPSAWSVAHYVELTGEVDSPLLARAVVAGLAQADTLRMRFTEDNGEVWQWVDDALTFELPEIIDLRTNIDPHGTAQALMQADLQQDLRVDSGKPLVFHQLIQVADNRWYWYQRYHHLLVDGFSFPAITRQIANIYCTWLRGEPTPASPFTPFADVVEEYQQYRESEAWQRDAAFWAEQRRQLPPPASLSPAPLPGRSASADILRLKLEFTDGEFRQLATQLSGVQRTDLALALAALWLGRLCNRMDYAAGFIFMRRLGSAALTATGPVLNVLPLGIHIGNPSFSELLTRVREVALGAYAHQHIPFEMLVEALQPERNLSHTPLFQVMFVLQNAPASQLELTGITANPIKVKSTTTKFDLTLIMQNTASGLVGVWEYNTDLFDASTIERMTGHFVTLLEGVIANPQQPISQLPILTTVEQQQLLVEWNNTQTDYPADKCIHQLFEEQVERTPDAVAVVFGNQQLSYREMREQVVALANLLRERGVKPGDSVAVALPRSVFLTLALHAIVEAGAAWLPLDTGYPDDRLKMMLEDARPSLLITTDDQLPRFSDVPNLTSLCYNAPLTPQGSAPLQLSQPHHTAYIIFTSGSTGRPKGVMVGQTAIVNRLLWMQNHYPLTGEDVVAQKTPCSFDVSVWEFFWPFIAGAKLVMAEPEAHRDPLAMQQFFAEYGVTTTHFVPSMLAAFVASLTPQTARQSCATLKQVFCSGEALPADLCREWQQLTGAPLHNLYGPTEAAVDVSWYPAFGEELAQVRGSSVPIGYPVWNTGLRILDAMMHPVPPGVAGDLYLTGIQLAQGYLGRPDLTASRFIADPFAPGERMYRTGDVARWLDNGAVEYLGRSDDQLKIRGQRIELGEIDRVMQALPDVEQAVASCAIAREDIPGNKHLVAYIVPQEEQTCTERSRSTLTVSFVRSFLKEKLPEYMVPSAIVILDALPLTPNGKLDRRALPAPDLHSQLETIIAAAFSSLLGCDVQDADADFFALGGHSLLAMKLAAQLSRQVARQVTPGQVMVASTVAKLATIIDAELDKYVAPRNPITSGEDNPIPLCQGDGEEMSTWLRRFGPPVEHRARLVCFPHAGAAADSYLDLARALAPEIDVHAVQYPGRQDRRDEEPLGTAGEIADEVAAVLRASGGDGPFALFGHSMGALIAYETARRLEREPGGGPLRLFVSGQTAPRVHERRTDLPGDDGLVDELRRLGTSEAALADEALLAMSLPVLRADYRVLRSYAWADGPPLRAGITALCGDADPLTATGDAERWLQHSVIPGRTRTFPGGHFYLGEQVTEVAGAVRRDLLRAGLAG

SEQ ID NO: 37 - protein, 4526 aa, Artificial Sequence
  IHC
MVAKHSLENGVFHKMTENEKELILHFNNTKTDYPKNKTLHELFEEQAMKTPDHTALVFGAQRMTYRELNEKANQTARLLREKGIGRGSIAAIIADRSFEMIIGIIGILKAGGAYLPIDPETPKDRIAFMLSDTKAAVLLTQGKAADGIDCEADIVQLDREASDGFSKEPLSSVNDSGDTAYIIYTSGSTGTPKGVITPHYSVIRVVQNTNYIDITEDNVILQLSNYSFDGSVFDIFGALLNGASLVMIEKEALLNINRLGSAINEEKVSVMFITTALFNMIADIHVDCLSNLRKILFGGERASIPHVRKVLNHVGRDKLIHVYGPTESTVYATYYFINEIDDEAETIPIGSPLANTSVLIMDEAGKLVPIGVPGELCIAGDGLSKGYLNREELTAEKFIPHPFIPGERLYKTGDLAKWLPDGNIEFIGRIDHQVKIRGFRIELGEIESRLEMHEDINETIVTVREDEESRPYICAYITANREISLDELKGFLGEKLPEYMIPAYFVKLDKLPLTKNGKVDRKALPEPDRTAGAENEYEAPRNETEEKLAAVWQDVLHVEKAGIHDHFAQMGGHSLHAMELIAKIKEKMNVEIPLHQLFKLATIKELSAFIEANGLPQEIKHTPAVRTTSEDPIAIVSMACRLPGGVNTPQRLWELLREGGETLSGFPTDRGWDLARLHHPDPDNPGTSYVDKGGFLDDAAGFDAEFFGVSPREAAAMDPQQRLLLETSWELVENAGIDPHSLRGTATGVFLGVAKFGYGEDTAAAEDVEGYSVTGVAPAVASGRISYTMGLEGPSISVDTACSSSLVALHLAVESLRKGESSMAVVGGAAVMATPGVFVDFSRQRALAADGRSKAFGAGADGFGFSEGVTLVLLERLSEARRNGHEVLAVVRGSALNQDGASNGLSAPSGPAQRRVIRQALESCGLEPGDVDAVEAHGTGTALGDPIEANALLDTYGRDRDADRPLWLGSVKSNIGHTQAAAGVTGLLKVVLALRNGELPATLHVEEPTPHVDWSSGGVALLAGNQPWRRGERTRRAAVSAFGISGTNAHVIVEEAPQEVRPAPGQGLSPAVSTLVVAGKTMQRVSATAGMLADWMEGPGADVALADVAHTLNHHRSRQPKFGTVVARDRTQAIAGLRALAAGQHAPGVVNPAEGSPGPGTVFVFPGQGSQRAGMGEELAAAFPVFARIHQQVWDLLDVPDLDVNETGYAQPALFALQVALFGLLESWGVRPDAVVGHSVGELAAGYVSGLWSLEDACTLVSARARLMQALPAGGVMAAVPVSEDEARAVLGEGVEIAAVNGPSSVVLSGDEAAVLQAAEGLGKWTRLPTSHAFHSARMEPMLEEFRAVAEGLTYRTPQVAMAAGDQVMTAEYWVRQVRDTVRFGEQVASFEDAVFVELGADRSLARLVDGIAMLHGDHEAQAGMRREQPLPLGLRRLLTDLHNAGAAVDFSVLCPQGRLVDAPLPAWSHRFLFYDREGVDNRSPGGSTVAVHPLLLAAVDVPGHGGAVFTGRLSTDEQPWLAEHVVGGRTLVPGSVLVDLALAAGEDVGLPVLEELVLQRPLVLAGAGALLRMSVGAPDESGRRTIDVHAAEDVADLADAQWSQHATGTLAQGVAAGPRDTEQWPPEDAVRIPLDDHYDGLAEQGYEYGPSFQALVAYVAEDATATMLAEVALPGSIRSQQGLYAIHPALLDACFQSVGAHPDSQSVGSGLLVPLGVRRVRAYAPVRTARYCYTRVTKVELAGVEADIDVLDAHGTVLLAVCGLRIGTGVSERDKHNRVLNERLLTIEWHQRELPEMDPSGAGKWLLISDCAASDVTATRLADAFREHSAACTTMRWPLHDDQLAAADQLRDQVGSDEFSGVVVLTGPNTGTPHQGSADRGAEYVRRLVGIARELSDLPGAVPRMYVVTRGAQRVLADDCVNLEQGGLRGLLRTIGAEHPHLRATQIDVDEQTGVEQLARQLLATSEEDETAWRDNEWYVARLCPTPLRPQERRTIVADHQQSGMRLQIRTPGAIDSVAFEPAPDVEQPLRAGEVRVDVRATGVNFRDVLLALGMYPQKADMGTEAAGVVTAVGPDVDAFAPGDRVLGLFQGAFAPIAVTDHRLLARVPDGWSDADAAAVPIAYTTAHYALHDLAGLRAGQSVLIHAAAGGVGMAAVALARRAGAEVLATAGPAKHGTLRALGLDDEHIASSRETGFARKFRERTGGRGVDVVLNSLTGELLDESADLLAEDGVFVEMGKTDLRDAGDFRGRYAPFDLGEAGDDRLGEILREVVGLLGAGELDRLPVSAWELGIPQTGKSLVTLPPEQAQVFRPDGTVLITGGTGTLGRLLARHLVTEHGVRHLLLVSRRGADAPGSDELRAEIEDLGASAEIAACDTADRDALSALLDGLPRPLTGVVHAAGVLADGLVTSIDEPAVEQVLRAKVDAAWNLHELTANTGLSFFVLFSSAASVLAGPGQGVYAAANESLNALAALRRTRGLPAKALGWGLWAIGRAIAFAEQTGDAIAPEEGAYAFETLLRHNRAYSGYAPVIGSPWLTAFAQHSPFAEKFQSLGQNRSGTSKFLAELVDLPREEWPDRLRRLLELVRSHAAAVSGYGSADQLPERKAFKDLGFDSLAAVELRNRLGTATGVRLPSTLVFDHPTPLAVAEHLRDRLLPVEQPFVHSPEERYRPFALTDVQQAYLVGRQPGFALGGVGSHFFVEFEIADLDIHRLEKVWNRLIARHDMLRAVVRDGQQRVLEQTPPWVIPAHILHSPEEALQVRDRLAHQVLNPEVWPVFDLQVGFVDGMPARLWLCLDNLLLDGLSMQILLSELEHGYRYPQQLPPPLPITFRDYLQQPALRTPNPDSLAWWQTQLDDIPPAPALPLRCLPQDVETPRFARLYGAMDSARWRRLKQRAADAHLTPSAVLLSVWSTVLAAWSAQPDFTLNLTLFDRRPLHPQINQILGDFTSLMLLSWHPGESWLQSARLLQQRLSESLNHRDVSAIRVMRQLARRQNVPAVPMPVVFTSALGFEQDNFLARRNLLKPVWGISQTPQVWLDHQVYESEGELRFNWDFVAALFPDGQVERQFAQYCALLNRMAEDDSSWQLPLADLVPPLKVTERRARRLRPERAQPRIAADKSSVSLICDTFREVVGEPVAPAENFFEAGATSLNLVQLHVLLQRHEFATLTLLDLFTHPSPVALANYLAGVALEEKTKRVRPVRRRQRRIGEPFPLAPMQHAMWVGRHDHQQLGGVAGHLYVEFDGARVDPDRLRAAATRLALRHPMLRVQFLPDGTQRIPPAAGSRDFPISVADLRHVAPDVVDQRLAGIRDAKSHQQLDGAVFELALTLLPGERTRLHVDLDMQAADAMSYRILLADLAALYDGREPPALGYTYREYRQAIEAEETLPQPVRDADRDWWAQRIPQLPDPPALPTRAGGERDRRRSTRRWHWLDPQTRDALFARARARGITPAMTLAAAFANVLARWSASSRFLLNLPLFSRQALHPDVDLLVGDFTSSLLLDVDLGDTVSNLARKNQLTFTEDWEHRHWSGVELLRELKRQQRYPHGAPVVFTSNLGRSLYSSRAESPLGEPEWGISQTPQVWIDHLAFEHHGEVWLQWDSNDALFPPALVETLFDAYCQLINQLCDDESAWQKPFADMMPASQRAIRERVNATGAPIPEGLLHEGIFRIALQQPQALAVTDMRYQWNSYREMREQVVALANLLRERGVKPGDSVAVALPRSVFLTLALHAIVEAGAAWLPLDTGYPDDRLKMMLEDARPSLLITTDDQLPRFSDVPNLTSLCYNAPLTPQGSAPLQLSQPHHTAYIIFTSGSTGRPKGVMVGQTAIVNRLLWMQNHYPLTGEDVVAQKTPCSFDVSVWEFFWPFIAGAKLVMAEPEAHRDPLAMQQFFAEYGVTTTHFVPSMLAAFVASLTPQTARQSCATLKQVFCSGEALPADLCREWQQLTGAPLHNLYGPTEAAVDVSWYPAFGEELAQVRGSSVPIGYPVWNTGLRILDAMMHPVPPGVAGDLYLTGIQLAQGYLGRPDLTASRFIADPFAPGERMYRTGDVARWLDNGAVEYLGRSDDQLKIRGQRIELGEIDRVMQALPDVEQAVASCAIAREDIPGNKHLVAYIVPQEEQTCTERSRSTLTVSFVRSFLKEKLPEYMVPSAIVILDALPLTPNGKLDRRALPAPDLHSQLLDKYVAPRNPIETIIAAAFSSLLGCDVQDADADFFALGGHSLLAMKLAAQLSRQVARQVTPGQVMVASTVAKLATIIDAETSGEDNPIPLCQGDGEEMSTWLRRFGPPVEHRARLVCFPHAGAAADSYLDLARALAPEIDVHAVQYPGRQDRRDEEPLGTAGEIADEVAAVLRASGGDGPFALFGHSMGALIAYETARRLEREPGGGPLRLFVSGQTAPRVHERRTDLPGDDGLVDELRRLGTSEAALADEALLAMSLPVLRADYRVLRSYAWADGPPLRAGITALCGDADPLTATGDAERWLQHSVIPGRTRTFPGGHFYLGEQVTEVAGAVRRDLLRAGLAG

SEQ ID NO: 38 - protein, 4967 aa, Artificial Sequence
  IHH
MVAKHSLENGVFHKMTENEKELILHFNNTKTDYPKNKTLHELFEEQAMKTPDHTALVFGAQRMTYRELNEKANQTARLLREKGIGRGSIAAIIADRSFEMIIGIIGILKAGGAYLPIDPETPKDRIAFMLSDTKAAVLLTQGKAADGIDCEADIVQLDREASDGFSKEPLSSVNDSGDTAYIIYTSGSTGTPKGVITPHYSVIRVVQNTNYIDITEDNVILQLSNYSFDGSVFDIFGALLNGASLVMIEKEALLNINRLGSAINEEKVSVMFITTALFNMIADIHVDCLSNLRKILFGGERASIPHVRKVLNHVGRDKLIHVYGPTESTVYATYYFINEIDDEAETIPIGSPLANTSVLIMDEAGKLVPIGVPGELCIAGDGLSKGYLNREELTAEKFIPHPFIPGERLYKTGDLAKWLPDGNIEFIGRIDHQVKIRGFRIELGEIESRLEMHEDINETIVTVREDEESRPYICAYITANREISLDELKGFLGEKLPEYMIPAYFVKLDKLPLTKNGKVDRKALPEPDRTAGAENEYEAPRNETEEKLAAVWQDVLHVEKAGIHDHFAQMGGHSLHAMELIAKIKEKMNVEIPLHQLFKLATIKELSAFIEANGLPQEIKHTPAVRTTSEDPIAIVSMACRLPGGVNTPQRLWELLREGGETLSGFPTDRGWDLARLHHPDPDNPGTSYVDKGGFLDDAAGFDAEFFGVSPREAAAMDPQQRLLLETSWELVENAGIDPHSLRGTATGVFLGVAKFGYGEDTAAAEDVEGYSVTGVAPAVASGRISYTMGLEGPSISVDTACSSSLVALHLAVESLRKGESSMAVVGGAAVMATPGVFVDFSRQRALAADGRSKAFGAGADGFGFSEGVTLVLLERLSEARRNGHEVLAVVRGSALNQDGASNGLSAPSGPAQRRVIRQALESCGLEPGDVDAVEAHGTGTALGDPIEANALLDTYGRDRDADRPLWLGSVKSNIGHTQAAAGVTGLLKVVLALRNGELPATLHVEEPTPHVDWSSGGVALLAGNQPWRRGERTRRAAVSAFGISGTNAHVIVEEAPQEVRPAPGQGLSPAVSTLVVAGKTMQRVSATAGMLADWMEGPGADVALADVAHTLNHHRSRQPKFGTVVARDRTQAIAGLRALAAGQHAPGVVNPAEGSPGPGTVFVFPGQGSQRAGMGEELAAAFPVFARIHQQVWDLLDVPDLDVNETGYAQPALFALQVALFGLLESWGVRPDAVVGHSVGELAAGYVSGLWSLEDACTLVSARARLMQALPAGGVMAAVPVSEDEARAVLGEGVEIAAVNGPSSVVLSGDEAAVLQAAEGLGKWTRLPTSHAFHSARMEPMLEEFRAVAEGLTYRTPQVAMAAGDQVMTAEYWVRQVRDTVRFGEQVASFEDAVFVELGADRSLARLVDGIAMLHGDHEAQAGMRREQPLPLGLRRLLTDLHNAGAAVDFSVLCPQGRLVDAPLPAWSHRFLFYDREGVDNRSPGGSTVAVHPLLLAAVDVPGHGGAVFTGRLSTDEQPWLAEHVVGGRTLVPGSVLVDLALAAGEDVGLPVLEELVLQRPLVLAGAGALLRMSVGAPDESGRRTIDVHAAEDVADLADAQWSQHATGTLAQGVAAGPRDTEQWPPEDAVRIPLDDHYDGLAEQGYEYGPSFQALVAYVAEDATATMLAEVALPGSIRSQQGLYAIHPALLDACFQSVGAHPDSQSVGSGLLVPLGVRRVRAYAPVRTARYCYTRVTKVELAGVEADIDVLDAHGTVLLAVCGLRIGTGVSERDKHNRVLNERLLTIEWHQRELPEMDPSGAGKWLLISDCAASDVTATRLADAFREHSAACTTMRWPLHDDQLAAADQLRDQVGSDEFSGVVVLTGPNTGTPHQGSADRGAEYVRRLVGIARELSDLPGAVPRMYVVTRGAQRVLADDCVNLEQGGLRGLLRTIGAEHPHLRATQIDVDEQTGVEQLARQLLATSEEDETAWRDNEWYVARLCPTPLRPQERRTIVADHQQSGMRLQIRTPGAIDSVAFEPAPDVEQPLRAGEVRVDVRATGVNFRDVLLALGMYPQKADMGTEAAGVVTAVGPDVDAFAPGDRVLGLFQGAFAPIAVTDHRLLARVPDGWSDADAAAVPIAYTTAHYALHDLAGLRAGQSVLIHAAAGGVGMAAVALARRAGAEVLATAGPAKHGTLRALGLDDEHIASSRETGFARKFRERTGGRGVDVVLNSLTGELLDESADLLAEDGVFVEMGKTDLRDAGDFRGRYAPFDLGEAGDDRLGEILREVVGLLGAGELDRLPVSAWELGIPQTGKSLVTLPPEQAQVFRPDGTVLITGGTGTLGRLLARHLVTEHGVRHLLLVSRRGADAPGSDELRAEIEDLGASAEIAACDTADRDALSALLDGLPRPLTGVVHAAGVLADGLVTSIDEPAVEQVLRAKVDAAWNLHELTANTGLSFFVLFSSAASVLAGPGQGVYAAANESLNALAALRRTRGLPAKALGWGLWAIGRAIAFAEQTGDAIAPEEGAYAFETLLRHNRAYSGYAPVIGSPWLTAFAQHSPFAEKFQSLGQNRSGTSKFLAELVDLPREEWPDRLRRLLELVRSHAAAVSGYGSADQLPERKAFKDLGFDSLAAVELRNRLGTATGVRLPSTLVFDHPTPLAVAEHLRDRLPGIGALVPAPVVIAAGRTEEPIAIVSMACRLPGGVNTPQRLWELLREGGETLSGFPTDRGWDLARLHHPDPDNPGTSYVDKGGFLDDAAGFDAEFFGVSPREAAAMDPQQRLLLETSWELVENAGIDPHSLRGTATGVFLGVAKFGYGEDTAAAEDVEGYSVTGVAPAVASGRISYTMGLEGPSISVDTACSSSLVALHLAVESLRKGESSMAVVGGAAVMATPGVFVDFSRQRALAADGRSKAFGAGADGFGFSEGVTLVLLERLSEARRNGHEVLAVVRGSALNQDGASNGLSAPSGPAQRRVIRQALESCGLEPGDVDAVEAHGTGTALGDPIEANALLDTYGRDRDADRPLWLGSVKSNIGHTQAAAGVTGLLKVVLALRNGELPATLHVEEPTPHVDWSSGGVALLAGNQPWRRGERTRRAAVSAFGISGTNAHVIVEEAPQEVRPAPGQGLSPAVSTLVVAGKTMQRVSATAGMLADWMEGPGADVALADVAHTLNHHRSRQPKFGTVVARDRTQAIAGLRALAAGQHAPGVVNPAEGSPGPGTVFVFPGQGSQRAGMGEELAAAFPVFARIHQQVWDLLDVPDLDVNETGYAQPALFALQVALFGLLESWGVRPDAVVGHSVGELAAGYVSGLWSLEDACTLVSARARLMQALPAGGVMAAVPVSEDEARAVLGEGVEIAAVNGPSSVVLSGDEAAVLQAAEGLGKWTRLPTSHAFHSARMEPMLEEFRAVAEGLTYRTPQVAMAAGDQVMTAEYWVRQVRDTVRFGEQVASFEDAVFVELGADRSLARLVDGIAMLHGDHEAQAGMRREQPLPLGLRRLLTDLHNAGAAVDFSVLCPQGRLVDAPLPAWSHRFLFYDREGVDNRSPGGSTVAVHPLLLAAVDVPGHGGAVFTGRLSTDEQPWLAEHVVGGRTLVPGSVLVDLALAAGEDVGLPVLEELVLQRPLVLAGAGALLRMSVGAPDESGRRTIDVHAAEDVADLADAQWSQHATGTLAQGVAAGPRDTEQWPPEDAVRIPLDDHYDGLAEQGYEYGPSFQALVAYVAEDATATMLAEVALPGSIRSQQGLYAIHPALLDACFQSVGAHPDSQSVGSGLLVPLGVRRVRAYAPVRTARYCYTRVTKVELAGVEADIDVLDAHGTVLLAVCGLRIGTGVSERDKHNRVLNERLLTIEWHQRELPEMDPSGAGKWLLISDCAASDVTATRLADAFREHSAACTTMRWPLHDDQLAAADQLRDQVGSDEFSGVVVLTGPNTGTPHQGSADRGAEYVRRLVGIARELSDLPGAVPRMYVVTRGAQRVLADDCVNLEQGGLRGLLRTIGAEHPHLRATQIDVDEQTGVEQLARQLLATSEEDETAWRDNEWYVARLCPTPLRPQERRTIVADHQQSGMRLQIRTPGAIDSVAFEPAPDVEQPLRAGEVRVDVRATGVNFRDVLLALGMYPQKADMGTEAAGVVTAVGPDVDAFAPGDRVLGLFQGAFAPIAVTDHRLLARVPDGWSDADAAAVPIAYTTAHYALHDLAGLRAGQSVLIHAAAGGVGMAAVALARRAGAEVLATAGPAKHGTLRALGLDDEHIASSRETGFARKFRERTGGRGVDVVLNSLTGELLDESADLLAEDGVFVEMGKTDLRDAGDFRGRYAPFDLGEAGDDRLGEILREVVGLLGAGELDRLPVSAWELGIPQTGKSLVTLPPEQAQVFRPDGTVLITGGTGTLGRLLARHLVTEHGVRHLLLVSRRGADAPGSDELRAEIEDLGASAEIAACDTADRDALSALLDGLPRPLTGVVHAAGVLADGLVTSIDEPAVEQVLRAKVDAAWNLHELTANTGLSFFVLFSSAASVLAGPGQGVYAAANESLNALAALRRTRGLPAKALGWGLWAIGRAIAFAEQTGDAIAPEEGAYAFETLLRHNRAYSGYAPVIGSPWLTAFAQHSPFAEKFQSLGQNRSGTSKFLAELVDLPREEWPDRLRRLLELVRSHAAAVSGYGSADQLPERKAFKDLGFDSLAAVELRNRLGTATGVRLPSTLVFDHPTPLAVAEHLRDRLTSGEDNPIPLCQGDGEEMSTWLRRFGPPVEHRARLVCFPHAGAAADSYLDLARALAPEIDVHAVQYPGRQDRRDEEPLGTAGEIADEVAAVLRASGGDGPFALFGHSMGALIAYETARRLEREPGGGPLRLFVSGQTAPRVHERRTDLPGDDGLVDELRRLGTSEAALADEALLAMSLPVLRADYRVLRSYAWADGPPLRAGITALCGDADPLTATGDAERWLQHSVIPGRTRTFPGGHFYLGEQVTEVAGAVRRDLLRAGLAG

SEQ ID NO: 39 - protein, 4416 aa, Artificial Sequence
  IHO
MVAKHSLENGVFHKMTENEKELILHFNNTKTDYPKNKTLHELFEEQAMKTPDHTALVFGAQRMTYRELNEKANQTARLLREKGIGRGSIAAIIADRSFEMIIGIIGILKAGGAYLPIDPETPKDRIAFMLSDTKAAVLLTQGKAADGIDCEADIVQLDREASDGFSKEPLSSVNDSGDTAYIIYTSGSTGTPKGVITPHYSVIRVVQNTNYIDITEDNVILQLSNYSFDGSVFDIFGALLNGASLVMIEKEALLNINRLGSAINEEKVSVMFITTALFNMIADIHVDCLSNLRKILFGGERASIPHVRKVLNHVGRDKLIHVYGPTESTVYATYYFINEIDDEAETIPIGSPLANTSVLIMDEAGKLVPIGVPGELCIAGDGLSKGYLNREELTAEKFIPHPFIPGERLYKTGDLAKWLPDGNIEFIGRIDHQVKIRGFRIELGEIESRLEMHEDINETIVTVREDEESRPYICAYITANREISLDELKGFLGEKLPEYMIPAYFVKLDKLPLTKNGKVDRKALPEPDRTAGAENEYEAPRNETEEKLAAVWQDVLHVEKAGIHDHFAQMGGHSLHAMELIAKIKEKMNVEIPLHQLFKLATIKELSAFIEANGLPQEIKHTPAVRTTSEDPIAIVSMACRLPGGVNTPQRLWELLREGGETLSGFPTDRGWDLARLHHPDPDNPGTSYVDKGGFLDDAAGFDAEFFGVSPREAAAMDPQQRLLLETSWELVENAGIDPHSLRGTATGVFLGVAKFGYGEDTAAAEDVEGYSVTGVAPAVASGRISYTMGLEGPSISVDTACSSSLVALHLAVESLRKGESSMAVVGGAAVMATPGVFVDFSRQRALAADGRSKAFGAGADGFGFSEGVTLVLLERLSEARRNGHEVLAVVRGSALNQDGASNGLSAPSGPAQRRVIRQALESCGLEPGDVDAVEAHGTGTALGDPIEANALLDTYGRDRDADRPLWLGSVKSNIGHTQAAAGVTGLLKVVLALRNGELPATLHVEEPTPHVDWSSGGVALLAGNQPWRRGERTRRAAVSAFGISGTNAHVIVEEAPQEVRPAPGQGLSPAVSTLVVAGKTMQRVSATAGMLADWMEGPGADVALADVAHTLNHHRSRQPKFGTVVARDRTQAIAGLRALAAGQHAPGVVNPAEGSPGPGTVFVFPGQGSQRAGMGEELAAAFPVFARIHQQVWDLLDVPDLDVNETGYAQPALFALQVALFGLLESWGVRPDAVVGHSVGELAAGYVSGLWSLEDACTLVSARARLMQALPAGGVMAAVPVSEDEARAVLGEGVEIAAVNGPSSVVLSGDEAAVLQAAEGLGKWTRLPTSHAFHSARMEPMLEEFRAVAEGLTYRTPQVAMAAGDQVMTAEYWVRQVRDTVRFGEQVASFEDAVFVELGADRSLARLVDGIAMLHGDHEAQAGMRREQPLPLGLRRLLTDLHNAGAAVDFSVLCPQGRLVDAPLPAWSHRFLFYDREGVDNRSPGGSTVAVHPLLLAAVDVPGHGGAVFTGRLSTDEQPWLAEHVVGGRTLVPGSVLVDLALAAGEDVGLPVLEELVLQRPLVLAGAGALLRMSVGAPDESGRRTIDVHAAEDVADLADAQWSQHATGTLAQGVAAGPRDTEQWPPEDAVRIPLDDHYDGLAEQGYEYGPSFQALVAYVAEDATATMLAEVALPGSIRSQQGLYAIHPALLDACFQSVGAHPDSQSVGSGLLVPLGVRRVRAYAPVRTARYCYTRVTKVELAGVEADIDVLDAHGTVLLAVCGLRIGTGVSERDKHNRVLNERLLTIEWHQRELPEMDPSGAGKWLLISDCAASDVTATRLADAFREHSAACTTMRWPLHDDQLAAADQLRDQVGSDEFSGVVVLTGPNTGTPHQGSADRGAEYVRRLVGIARELSDLPGAVPRMYVVTRGAQRVLADDCVNLEQGGLRGLLRTIGAEHPHLRATQIDVDEQTGVEQLARQLLATSEEDETAWRDNEWYVARLCPTPLRPQERRTIVADHQQSGMRLQIRTPGAIDSVAFEPAPDVEQPLRAGEVRVDVRATGVNFRDVLLALGMYPQKADMGTEAAGVVTAVGPDVDAFAPGDRVLGLFQGAFAPIAVTDHRLLARVPDGWSDADAAAVPIAYTTAHYALHDLAGLRAGQSVLIHAAAGGVGMAAVALARRAGAEVLATAGPAKHGTLRALGLDDEHIASSRETGFARKFRERTGGRGVDVVLNSLTGELLDESADLLAEDGVFVEMGKTDLRDAGDFRGRYAPFDLGEAGDDRLGEILREVVGLLGAGELDRLPVSAWELGIPQTGKSLVTLPPEQAQVFRPDGTVLITGGTGTLGRLLARHLVTEHGVRHLLLVSRRGADAPGSDELRAEIEDLGASAEIAACDTADRDALSALLDGLPRPLTGVVHAAGVLADGLVTSIDEPAVEQVLRAKVDAAWNLHELTANTGLSFFVLFSSAASVLAGPGQGVYAAANESLNALAALRRTRGLPAKALGWGLWAIGRAIAFAEQTGDAIAPEEGAYAFETLLRHNRAYSGYAPVIGSPWLTAFAQHSPFAEKFQSLGQNRSGTSKFLAELVDLPREEWPDRLRRLLELVRSHAAAVSGYGSADQLPERKAFKDLGFDSLAAVELRNRLGTATGVRLPSTLVFDHPTPLAVAEHLRDRLPGIGALVPAPVVIAAGRTEEPIAIVSMACRLPGGVNTPQRLWELLREGGETLSGFPTDRGWDLARLHHPDPDNPGTSYVDKGGFLDDAAGFDAEFFGVSPREAAAMDPQQRLLLETSWELVENAGIDPHSLRGTATGVFLGVAKFGYGEDTAAAEDVEGYSVTGVAPAVASGRISYTMGLEGPSISVDTACSSSLVALHLAVESLRKGESSMAVVGGAAVMATPGVFVDFSRQRALAADGRSKAFGAGADGFGFSEGVTLVLLERLSEARRNGHEVLAVVRGSALNQDGASNGLSAPSGPAQRRVIRQALESCGLEPGDVDAVEAHGTGTALGDPIEANALLDTYGRDRDADRPLWLGSVKSNIGHTQAAAGVTGLLKVVLALRNGELPATLHVEEPTPHVDWSSGGVALLAGNQPWRRGERTRRAAVSAFGISGTNAHVIVEEAPQEVRPAPGQGLSPAVSTLVVAGKTMQRVSATAGMLADWMEGPGADVALADVAHTLNHHRSRQPKFGTVVARDRTQAIAGLRALAAGQHAPGVVNPAEGSPGPGTVFVFPGQGSQRAGMGEELAAAFPVFARIHQQVWDLLDVPDLDVNETGYAQPALFALQVALFGLLESWGVRPDAVVGHSVGELAAGYVSGLWSLEDACTLVSARARLMQALPAGGVMAAVPVSEDEARAVLGEGVEIAAVNGPSSVVLSGDEAAVLQAAEGLGKWTRLPTSHAFHSARMEPMLEEFRAVAEGLTYRTPQVAMAAGDQVMTAEYWVRQVRDTVRFGEQVASFEDAVFVELGADRSLARLVDGIAMLHGDHEAQAADHRQITEAVADAYVLGHLPDFAALRRPHARKLDLPTYPFERRQYWFRDARERPEQPRDTGGPRTEAVRLLEDGRIEELAALLGGASDDQHTLQVLTKLAAQHNQQRTTRSIADDRYEIRWDRSTSPLSGADVDQAGSWIVVSDDADAVPPLVDLLAARNEPHQVVGLPASDADEERLAETLRAAATEDATLRIVHVAALEAGATPSMRSLLRMQHRILGGTRRVFRAAVAAELRGPIWIVTRGAQRVADTDTVAPHQSCLWGFGRAASLELPHVWGGLADLSEGGDNAADEWSALVDRIAAPHGSAVREDQLALRDRAVYTPRLARRSAPPSGTPLHLRGDGTVLITGGTGTLGRLLARHLVTEHGVRHLLLVSRRGADAPGSDELRAEIEDLGASAEIAACDTADRDALSALLDGLPRPLTGVVHAAGVLADGLVTSIDEPAVEQVLRAKVDAAWNLHELTANTGLSFFVLFSSAASVLAGPGQGVYAAANESLNALAALRRTRGLPAKALGWGLWAIGRAIAFAEQTGDAIAPEEGAYAFETLLRHNRAYSGYAPVIGSPWLTAFAQHSPFAEKFQSLGQNRSGTSKFLAELVDLPREEWPDRLRRLLELVRSHAAAVSGYGSADQLPERKAFKDLGFDSLAAVELRNRLGTATGVRLPSTLVFDHPTPLAVAEHLRDRLTSGEDNPIPLCQGDGEEMSTWLRRFGPPVEHRARLVCFPHAGAAADSYLDLARALAPEIDVHAVQYPGRQDRRDEEPLGTAGEIADEVAAVLRASGGDGPFALFGHSMGALIAYETARRLEREPGGGPLRLFVSGQTAPRVHERRTDLPGDDGLVDELRRLGTSEAALADEALLAMSLPVLRADYRVLRSYAWADGPPLRAGITALCGDADPLTATGDAERWLQHSVIPGRTRTFPGGHFYLGEQVTEVAGAVRRDLLRAGLAG

SEQ ID NO: 40 - protein, 4529 aa, Artificial Sequence
  IHS
MVAKHSLENGVFHKMTENEKELILHFNNTKTDYPKNKTLHELFEEQAMKTPDHTALVFGAQRMTYRELNEKANQTARLLREKGIGRGSIAAIIADRSFEMIIGIIGILKAGGAYLPIDPETPKDRIAFMLSDTKAAVLLTQGKAADGIDCEADIVQLDREASDGFSKEPLSSVNDSGDTAYIIYTSGSTGTPKGVITPHYSVIRVVQNTNYIDITEDNVILQLSNYSFDGSVFDIFGALLNGASLVMIEKEALLNINRLGSAINEEKVSVMFITTALFNMIADIHVDCLSNLRKILFGGERASIPHVRKVLNHVGRDKLIHVYGPTESTVYATYYFINEIDDEAETIPIGSPLANTSVLIMDEAGKLVPIGVPGELCIAGDGLSKGYLNREELTAEKFIPHPFIPGERLYKTGDLAKWLPDGNIEFIGRIDHQVKIRGFRIELGEIESRLEMHEDINETIVTVREDEESRPYICAYITANREISLDELKGFLGEKLPEYMIPAYFVKLDKLPLTKNGKVDRKALPEPDRTAGAENEYEAPRNETEEKLAAVWQDVLHVEKAGIHDHFAQMGGHSLHAMELIAKIKEKMNVEIPLHQLFKLATIKELSAFIEANGLPQEIKHTPAVRTTSEDPIAIVSMACRLPGGVNTPQRLWELLREGGETLSGFPTDRGWDLARLHHPDPDNPGTSYVDKGGFLDDAAGFDAEFFGVSPREAAAMDPQQRLLLETSWELVENAGIDPHSLRGTATGVFLGVAKFGYGEDTAAAEDVEGYSVTGVAPAVASGRISYTMGLEGPSISVDTACSSSLVALHLAVESLRKGESSMAVVGGAAVMATPGVFVDFSRQRALAADGRSKAFGAGADGFGFSEGVTLVLLERLSEARRNGHEVLAVVRGSALNQDGASNGLSAPSGPAQRRVIRQALESCGLEPGDVDAVEAHGTGTALGDPIEANALLDTYGRDRDADRPLWLGSVKSNIGHTQAAAGVTGLLKVVLALRNGELPATLHVEEPTPHVDWSSGGVALLAGNQPWRRGERTRRAAVSAFGISGTNAHVIVEEAPQEVRPAPGQGLSPAVSTLVVAGKTMQRVSATAGMLADWMEGPGADVALADVAHTLNHHRSRQPKFGTVVARDRTQAIAGLRALAAGQHAPGVVNPAEGSPGPGTVFVFPGQGSQRAGMGEELAAAFPVFARIHQQVWDLLDVPDLDVNETGYAQPALFALQVALFGLLESWGVRPDAVVGHSVGELAAGYVSGLWSLEDACTLVSARARLMQALPAGGVMAAVPVSEDEARAVLGEGVEIAAVNGPSSVVLSGDEAAVLQAAEGLGKWTRLPTSHAFHSARMEPMLEEFRAVAEGLTYRTPQVAMAAGDQVMTAEYWVRQVRDTVRFGEQVASFEDAVFVELGADRSLARLVDGIAMLHGDHEAQAGMRREQPLPLGLRRLLTDLHNAGAAVDFSVLCPQGRLVDAPLPAWSHRFLFYDREGVDNRSPGGSTVAVHPLLLAAVDVPGHGGAVFTGRLSTDEQPWLAEHVVGGRTLVPGSVLVDLALAAGEDVGLPVLEELVLQRPLVLAGAGALLRMSVGAPDESGRRTIDVHAAEDVADLADAQWSQHATGTLAQGVAAGPRDTEQWPPEDAVRIPLDDHYDGLAEQGYEYGPSFQALVAYVAEDATATMLAEVALPGSIRSQQGLYAIHPALLDACFQSVGAHPDSQSVGSGLLVPLGVRRVRAYAPVRTARYCYTRVTKVELAGVEADIDVLDAHGTVLLAVCGLRIGTGVSERDKHNRVLNERLLTIEWHQRELPEMDPSGAGKWLLISDCAASDVTATRLADAFREHSAACTTMRWPLHDDQLAAADQLRDQVGSDEFSGVVVLTGPNTGTPHQGSADRGAEYVRRLVGIARELSDLPGAVPRMYVVTRGAQRVLADDCVNLEQGGLRGLLRTIGAEHPHLRATQIDVDEQTGVEQLARQLLATSEEDETAWRDNEWYVARLCPTPLRPQERRTIVADHQQSGMRLQIRTPGAIDSVAFEPAPDVEQPLRAGEVRVDVRATGVNFRDVLLALGMYPQKADMGTEAAGVVTAVGPDVDAFAPGDRVLGLFQGAFAPIAVTDHRLLARVPDGWSDADAAAVPIAYTTAHYALHDLAGLRAGQSVLIHAAAGGVGMAAVALARRAGAEVLATAGPAKHGTLRALGLDDEHIASSRETGFARKFRERTGGRGVDVVLNSLTGELLDESADLLAEDGVFVEMGKTDLRDAGDFRGRYAPFDLGEAGDDRLGEILREVVGLLGAGELDRLPVSAWELGIPQTGKSLVTLPPEQAQVFRPDGTVLITGGTGTLGRLLARHLVTEHGVRHLLLVSRRGADAPGSDELRAEIEDLGASAEIAACDTADRDALSALLDGLPRPLTGVVHAAGVLADGLVTSIDEPAVEQVLRAKVDAAWNLHELTANTGLSFFVLFSSAASVLAGPGQGVYAAANESLNALAALRRTRGLPAKALGWGLWAIGRAIAFAEQTGDAIAPEEGAYAFETLLRHNRAYSGYAPVIGSPWLTAFAQHSPFAEKFQSLGQNRSGTSKFLAELVDLPREEWPDRLRRLLELVRSHAAAVSGYGSADQLPERKAFKDLGFDSLAAVELRNRLGTATGVRLPSTLVFDHPTPLAVAEHLRDRLLPVEQPFVHSPEERYRPFALTDVQQAYLVGRQPGFALGGVGSHFFVEFEIADLDIHRLEKVWNRLIARHDMLRAVVRDGQQRVLEQTPPWVIPAHILHSPEEALQVRDRLAHQVLNPEVWPVFDLQVGFVDGMPARLWLCLDNLLLDGLSMQILLSELEHGYRYPQQLPPPLPITFRDYLQQPALRTPNPDSLAWWQTQLDDIPPAPALPLRCLPQDVETPRFARLYGAMDSARWRRLKQRAADAHLTPSAVLLSVWSTVLAAWSAQPDFTLNLTLFDRRPLHPQINQILGDFTSLMLLSWHPGESWLQSARLLQQRLSESLNHRDVSAIRVMRQLARRQNVPAVPMPVVFTSALGFEQDNFLARRNLLKPVWGISQTPQVWLDHQVYESEGELRFNWDFVAALFPDGQVERQFAQYCALLNRMAEDDSSWQLPLADLVPPLKVTERRARRLRPERAQPRIAADKSSVSLICDTFREVVGEPVAPAENFFEAGATSLNLVQLHVLLQRHEFATLTLLDLFTHPSPVALANYLAGVALEEKTKRVRPVRRRQRRIQHLPLVAAQPGIWMAEKLSELPSAWSVAHYVELTGEVDSPLLARAVVAGLAQADTLRMRFTEDNGEVWQWVDDALTFELPEIIDLRTNIDPHGTAQALMQADLQQDLRVDSGKPLVFHQLIQVADNRWYWYQRYHHLLVDGFSFPAITRQIANIYCTWLRGEPTPASPFTPFADVVEEYQQYRESEAWQRDAAFWAEQRRQLPPPASLSPAPLPGRSASADILRLKLEFTDGEFRQLATQLSGVQRTDLALALAALWLGRLCNRMDYAAGFIFMRRLGSAALTATGPVLNVLPLGIHIGNPSFSELLTRVREVALGAYAHQHIPFEMLVEALQPERNLSHTPLFQVMFVLQNAPASQLELTGITANPIKVKSTTTKFDLTLIMQNTASGLVGVWEYNTDLFDASTIERMTGHFVTLLEGVIANPQQPISQLPILTTVEQQQLLVEWNNTQTDYPADKCIHQLFEEQVERTPDAVAVVFGNQQLSYREMREQVVALANLLRERGVKPGDSVAVALPRSVFLTLALHAIVEAGAAWLPLDTGYPDDRLKMMLEDARPSLLITTDDQLPRFSDVPNLTSLCYNAPLTPQGSAPLQLSQPHHTAYIIFTSGSTGRPKGVMVGQTAIVNRLLWMQNHYPLTGEDVVAQKTPCSFDVSVWEFFWPFIAGAKLVMAEPEAHRDPLAMQQFFAEYGVTTTHFVPSMLAAFVASLTPQTARQSCATLKQVFCSGEALPADLCREWQQLTGAPLHNLYGPTEAAVDVSWYPAFGEELAQVRGSSVPIGYPVWNTGLRILDAMMHPVPPGVAGDLYLTGIQLAQGYLGRPDLTASRFIADPFAPGERMYRTGDVARWLDNGAVEYLGRSDDQLKIRGQRIELGEIDRVMQALPDVEQAVASCAIAREDIPGNKHLVAYIVPQEEQTCTERSRSTLTVSFVRSFLKEKLPEYMVPSAIVILDALPLTPNGKLDRRALPAPDLHSQLETIIAAAFSSLLGCDVQDADADFFALGGHSLLAMKLAAQLSRQVARQVTPGQVMVASTVAKLATIIDAELDKYVAPRNPITSGEDNPIPLCQGDGEEMSTWLRRFGPPVEHRARLVCFPHAGAAADSYLDLARALAPEIDVHAVQYPGRQDRRDEEPLGTAGEIADEVAAVLRASGGDGPFALFGHSMGALIAYETARRLEREPGGGPLRLFVSGQTAPRVHERRTDLPGDDGLVDELRRLGTSEAALADEALLAMSLPVLRADYRVLRSYAWADGPPLRAGITALCGDADPLTATGDAERWLQHSVIPGRTRTFPGGHFYLGEQVTEVAGAVRRDLLRAGLAG

SEQ ID NO: 41 - protein, 3975 aa, Artificial Sequence
  IOC
MVAKHSLENGVFHKMTENEKELILHFNNTKTDYPKNKTLHELFEEQAMKTPDHTALVFGAQRMTYRELNEKANQTARLLREKGIGRGSIAAIIADRSFEMIIGIIGILKAGGAYLPIDPETPKDRIAFMLSDTKAAVLLTQGKAADGIDCEADIVQLDREASDGFSKEPLSSVNDSGDTAYIIYTSGSTGTPKGVITPHYSVIRVVQNTNYIDITEDNVILQLSNYSFDGSVFDIFGALLNGASLVMIEKEALLNINRLGSAINEEKVSVMFITTALFNMIADIHVDCLSNLRKILFGGERASIPHVRKVLNHVGRDKLIHVYGPTESTVYATYYFINEIDDEAETIPIGSPLANTSVLIMDEAGKLVPIGVPGELCIAGDGLSKGYLNREELTAEKFIPHPFIPGERLYKTGDLAKWLPDGNIEFIGRIDHQVKIRGFRIELGEIESRLEMHEDINETIVTVREDEESRPYICAYITANREISLDELKGFLGEKLPEYMIPAYFVKLDKLPLTKNGKVDRKALPEPDRTAGAENEYEAPRNETEEKLAAVWQDVLHVEKAGIHDHFAQMGGHSLHAMELIAKIKEKMNVEIPLHQLFKLATIKELSAFIEANGLPQEIKHTPAVRTTSEDPIAIVSMACRLPGGVNTPQRLWELLREGGETLSGFPTDRGWDLARLHHPDPDNPGTSYVDKGGFLDDAAGFDAEFFGVSPREAAAMDPQQRLLLETSWELVENAGIDPHSLRGTATGVFLGVAKFGYGEDTAAAEDVEGYSVTGVAPAVASGRISYTMGLEGPSISVDTACSSSLVALHLAVESLRKGESSMAVVGGAAVMATPGVFVDFSRQRALAADGRSKAFGAGADGFGFSEGVTLVLLERLSEARRNGHEVLAVVRGSALNQDGASNGLSAPSGPAQRRVIRQALESCGLEPGDVDAVEAHGTGTALGDPIEANALLDTYGRDRDADRPLWLGSVKSNIGHTQAAAGVTGLLKVVLALRNGELPATLHVEEPTPHVDWSSGGVALLAGNQPWRRGERTRRAAVSAFGISGTNAHVIVEEAPQEVRPAPGQGLSPAVSTLVVAGKTMQRVSATAGMLADWMEGPGADVALADVAHTLNHHRSRQPKFGTVVARDRTQAIAGLRALAAGQHAPGVVNPAEGSPGPGTVFVFPGQGSQRAGMGEELAAAFPVFARIHQQVWDLLDVPDLDVNETGYAQPALFALQVALFGLLESWGVRPDAVVGHSVGELAAGYVSGLWSLEDACTLVSARARLMQALPAGGVMAAVPVSEDEARAVLGEGVEIAAVNGPSSVVLSGDEAAVLQAAEGLGKWTRLPTSHAFHSARMEPMLEEFRAVAEGLTYRTPQVAMAAGDQVMTAEYWVRQVRDTVRFGEQVASFEDAVFVELGADRSLARLVDGIAMLHGDHEAQAADHRQITEAVADAYVLGHLPDFAALRRPHARKLDLPTYPFERRQYWFRDARERPEQPRDTGGPRTEAVRLLEDGRIEELAALLGGASDDQHTLQVLTKLAAQHNQQRTTRSIADDRYEIRWDRSTSPLSGADVDQAGSWIVVSDDADAVPPLVDLLAARNEPHQVVGLPASDADEERLAETLRAAATEDATLRIVHVAALEAGATPSMRSLLRMQHRILGGTRRVFRAAVAAELRGPIWIVTRGAQRVADTDTVAPHQSCLWGFGRAASLELPHVWGGLADLSEGGDNAADEWSALVDRIAAPHGSAVREDQLALRDRAVYTPRLARRSAPPSGTPLHLRGDGTVLITGGTGTLGRLLARHLVTEHGVRHLLLVSRRGADAPGSDELRAEIEDLGASAEIAACDTADRDALSALLDGLPRPLTGVVHAAGVLADGLVTSIDEPAVEQVLRAKVDAAWNLHELTANTGLSFFVLFSSAASVLAGPGQGVYAAANESLNALAALRRTRGLPAKALGWGLWAIGRAIAFAEQTGDAIAPEEGAYAFETLLRHNRAYSGYAPVIGSPWLTAFAQHSPFAEKFQSLGQNRSGTSKFLAELVDLPREEWPDRLRRLLELVRSHAAAVSGYGSADQLPERKAFKDLGFDSLAAVELRNRLGTATGVRLPSTLVFDHPTPLAVAEHLRDRLLPVEQPFVHSPEERYRPFALTDVQQAYLVGRQPGFALGGVGSHFFVEFEIADLDIHRLEKVWNRLIARHDMLRAVVRDGQQRVLEQTPPWVIPAHILHSPEEALQVRDRLAHQVLNPEVWPVFDLQVGFVDGMPARLWLCLDNLLLDGLSMQILLSELEHGYRYPQQLPPPLPITFRDYLQQPALRTPNPDSLAWWQTQLDDIPPAPALPLRCLPQDVETPRFARLYGAMDSARWRRLKQRAADAHLTPSAVLLSVWSTVLAAWSAQPDFTLNLTLFDRRPLHPQINQILGDFTSLMLLSWHPGESWLQSARLLQQRLSESLNHRDVSAIRVMRQLARRQNVPAVPMPVVFTSALGFEQDNFLARRNLLKPVWGISQTPQVWLDHQVYESEGELRFNWDFVAALFPDGQVERQFAQYCALLNRMAEDDSSWQLPLADLVPPLKVTERRARRLRPERAQPRIAADKSSVSLICDTFREVVGEPVAPAENFFEAGATSLNLVQLHVLLQRHEFATLTLLDLFTHPSPVALANYLAGVALEEKTKRVRPVRRRQRRIGEPFPLAPMQHAMWVGRHDHQQLGGVAGHLYVEFDGARVDPDRLRAAATRLALRHPMLRVQFLPDGTQRIPPAAGSRDFPISVADLRHVAPDVVDQRLAGIRDAKSHQQLDGAVFELALTLLPGERTRLHVDLDMQAADAMSYRILLADLAALYDGREPPALGYTYREYRQAIEAEETLPQPVRDADRDWWAQRIPQLPDPPALPTRAGGERDRRRSTRRWHWLDPQTRDALFARARARGITPAMTLAAAFANVLARWSASSRFLLNLPLFSRQALHPDVDLLVGDFTSSLLLDVDLGDTVSNLARKNQLTFTEDWEHRHWSGVELLRELKRQQRYPHGAPVVFTSNLGRSLYSSRAESPLGEPEWGISQTPQVWIDHLAFEHHGEVWLQWDSNDALFPPALVETLFDAYCQLINQLCDDESAWQKPFADMMPASQRAIRERVNATGAPIPEGLLHEGIFRIALQQPQALAVTDMRYQWNSYREMREQVVALANLLRERGVKPGDSVAVALPRSVFLTLALHAIVEAGAAWLPLDTGYPDDRLKMMLEDARPSLLITTDDQLPRFSDVPNLTSLCYNAPLTPQGSAPLQLSQPHHTAYIIFTSGSTGRPKGVMVGQTAIVNRLLWMQNHYPLTGEDVVAQKTPCSFDVSVWEFFWPFIAGAKLVMAEPEAHRDPLAMQQFFAEYGVTTTHFVPSMLAAFVASLTPQTARQSCATLKQVFCSGEALPADLCREWQQLTGAPLHNLYGPTEAAVDVSWYPAFGEELAQVRGSSVPIGYPVWNTGLRILDAMMHPVPPGVAGDLYLTGIQLAQGYLGRPDLTASRFIADPFAPGERMYRTGDVARWLDNGAVEYLGRSDDQLKIRGQRIELGEIDRVMQALPDVEQAVASCAIAREDIPGNKHLVAYIVPQEEQTCTERSRSTLTVSFVRSFLKEKLPEYMVPSAIVILDALPLTPNGKLDRRALPAPDLHSQLLDKYVAPRNPIETIIAAAFSSLLGCDVQDADADFFALGGHSLLAMKLAAQLSRQVARQVTPGQVMVASTVAKLATIIDAETSGEDNPIPLCQGDGEEMSTWLRRFGPPVEHRARLVCFPHAGAAADSYLDLARALAPEIDVHAVQYPGRQDRRDEEPLGTAGEIADEVAAVLRASGGDGPFALFGHSMGALIAYETARRLEREPGGGPLRLFVSGQTAPRVHERRTDLPGDDGLVDELRRLGTSEAALADEALLAMSLPVLRADYRVLRSYAWADGPPLRAGITALCGDADPLTATGDAERWLQHSVIPGRTRTFPGGHFYLGEQVTEVAGAVRRDLLRAGLAG

SEQ ID NO: 42 - protein, 4416 aa, Artificial Sequence
  IOH
MVAKHSLENGVFHKMTENEKELILHFNNTKTDYPKNKTLHELFEEQAMKTPDHTALVFGAQRMTYRELNEKANQTARLLREKGIGRGSIAAIIADRSFEMIIGIIGILKAGGAYLPIDPETPKDRIAFMLSDTKAAVLLTQGKAADGIDCEADIVQLDREASDGFSKEPLSSVNDSGDTAYIIYTSGSTGTPKGVITPHYSVIRVVQNTNYIDITEDNVILQLSNYSFDGSVFDIFGALLNGASLVMIEKEALLNINRLGSAINEEKVSVMFITTALFNMIADIHVDCLSNLRKILFGGERASIPHVRKVLNHVGRDKLIHVYGPTESTVYATYYFINEIDDEAETIPIGSPLANTSVLIMDEAGKLVPIGVPGELCIAGDGLSKGYLNREELTAEKFIPHPFIPGERLYKTGDLAKWLPDGNIEFIGRIDHQVKIRGFRIELGEIESRLEMHEDINETIVTVREDEESRPYICAYITANREISLDELKGFLGEKLPEYMIPAYFVKLDKLPLTKNGKVDRKALPEPDRTAGAENEYEAPRNETEEKLAAVWQDVLHVEKAGIHDHFAQMGGHSLHAMELIAKIKEKMNVEIPLHQLFKLATIKELSAFIEANGLPQEIKHTPAVRTTSEDPIAIVSMACRLPGGVNTPQRLWELLREGGETLSGFPTDRGWDLARLHHPDPDNPGTSYVDKGGFLDDAAGFDAEFFGVSPREAAAMDPQQRLLLETSWELVENAGIDPHSLRGTATGVFLGVAKFGYGEDTAAAEDVEGYSVTGVAPAVASGRISYTMGLEGPSISVDTACSSSLVALHLAVESLRKGESSMAVVGGAAVMATPGVFVDFSRQRALAADGRSKAFGAGADGFGFSEGVTLVLLERLSEARRNGHEVLAVVRGSALNQDGASNGLSAPSGPAQRRVIRQALESCGLEPGDVDAVEAHGTGTALGDPIEANALLDTYGRDRDADRPLWLGSVKSNIGHTQAAAGVTGLLKVVLALRNGELPATLHVEEPTPHVDWSSGGVALLAGNQPWRRGERTRRAAVSAFGISGTNAHVIVEEAPQEVRPAPGQGLSPAVSTLVVAGKTMQRVSATAGMLADWMEGPGADVALADVAHTLNHHRSRQPKFGTVVARDRTQAIAGLRALAAGQHAPGVVNPAEGSPGPGTVFVFPGQGSQRAGMGEELAAAFPVFARIHQQVWDLLDVPDLDVNETGYAQPALFALQVALFGLLESWGVRPDAVVGHSVGELAAGYVSGLWSLEDACTLVSARARLMQALPAGGVMAAVPVSEDEARAVLGEGVEIAAVNGPSSVVLSGDEAAVLQAAEGLGKWTRLPTSHAFHSARMEPMLEEFRAVAEGLTYRTPQVAMAAGDQVMTAEYWVRQVRDTVRFGEQVASFEDAVFVELGADRSLARLVDGIAMLHGDHEAQAADHRQITEAVADAYVLGHLPDFAALRRPHARKLDLPTYPFERRQYWFRDARERPEQPRDTGGPRTEAVRLLEDGRIEELAALLGGASDDQHTLQVLTKLAAQHNQQRTTRSIADDRYEIRWDRSTSPLSGADVDQAGSWIVVSDDADAVPPLVDLLAARNEPHQVVGLPASDADEERLAETLRAAATEDATLRIVHVAALEAGATPSMRSLLRMQHRILGGTRRVFRAAVAAELRGPIWIVTRGAQRVADTDTVAPHQSCLWGFGRAASLELPHVWGGLADLSEGGDNAADEWSALVDRIAAPHGSAVREDQLALRDRAVYTPRLARRSAPPSGTPLHLRGDGTVLITGGTGTLGRLLARHLVTEHGVRHLLLVSRRGADAPGSDELRAEIEDLGASAEIAACDTADRDALSALLDGLPRPLTGVVHAAGVLADGLVTSIDEPAVEQVLRAKVDAAWNLHELTANTGLSFFVLFSSAASVLAGPGQGVYAAANESLNALAALRRTRGLPAKALGWGLWAIGRAIAFAEQTGDAIAPEEGAYAFETLLRHNRAYSGYAPVIGSPWLTAFAQHSPFAEKFQSLGQNRSGTSKFLAELVDLPREEWPDRLRRLLELVRSHAAAVSGYGSADQLPERKAFKDLGFDSLAAVELRNRLGTATGVRLPSTLVFDHPTPLAVAEHLRDRLPGIGALVPAPVVIAAGRTEEPIAIVSMACRLPGGVNTPQRLWELLREGGETLSGFPTDRGWDLARLHHPDPDNPGTSYVDKGGFLDDAAGFDAEFFGVSPREAAAMDPQQRLLLETSWELVENAGIDPHSLRGTATGVFLGVAKFGYGEDTAAAEDVEGYSVTGVAPAVASGRISYTMGLEGPSISVDTACSSSLVALHLAVESLRKGESSMAVVGGAAVMATPGVFVDFSRQRALAADGRSKAFGAGADGFGFSEGVTLVLLERLSEARRNGHEVLAVVRGSALNQDGASNGLSAPSGPAQRRVIRQALESCGLEPGDVDAVEAHGTGTALGDPIEANALLDTYGRDRDADRPLWLGSVKSNIGHTQAAAGVTGLLKVVLALRNGELPATLHVEEPTPHVDWSSGGVALLAGNQPWRRGERTRRAAVSAFGISGTNAHVIVEEAPQEVRPAPGQGLSPAVSTLVVAGKTMQRVSATAGMLADWMEGPGADVALADVAHTLNHHRSRQPKFGTVVARDRTQAIAGLRALAAGQHAPGVVNPAEGSPGPGTVFVFPGQGSQRAGMGEELAAAFPVFARIHQQVWDLLDVPDLDVNETGYAQPALFALQVALFGLLESWGVRPDAVVGHSVGELAAGYVSGLWSLEDACTLVSARARLMQALPAGGVMAAVPVSEDEARAVLGEGVEIAAVNGPSSVVLSGDEAAVLQAAEGLGKWTRLPTSHAFHSARMEPMLEEFRAVAEGLTYRTPQVAMAAGDQVMTAEYWVRQVRDTVRFGEQVASFEDAVFVELGADRSLARLVDGIAMLHGDHEAQAGMRREQPLPLGLRRLLTDLHNAGAAVDFSVLCPQGRLVDAPLPAWSHRFLFYDREGVDNRSPGGSTVAVHPLLLAAVDVPGHGGAVFTGRLSTDEQPWLAEHVVGGRTLVPGSVLVDLALAAGEDVGLPVLEELVLQRPLVLAGAGALLRMSVGAPDESGRRTIDVHAAEDVADLADAQWSQHATGTLAQGVAAGPRDTEQWPPEDAVRIPLDDHYDGLAEQGYEYGPSFQALVAYVAEDATATMLAEVALPGSIRSQQGLYAIHPALLDACFQSVGAHPDSQSVGSGLLVPLGVRRVRAYAPVRTARYCYTRVTKVELAGVEADIDVLDAHGTVLLAVCGLRIGTGVSERDKHNRVLNERLLTIEWHQRELPEMDPSGAGKWLLISDCAASDVTATRLADAFREHSAACTTMRWPLHDDQLAAADQLRDQVGSDEFSGVVVLTGPNTGTPHQGSADRGAEYVRRLVGIARELSDLPGAVPRMYVVTRGAQRVLADDCVNLEQGGLRGLLRTIGAEHPHLRATQIDVDEQTGVEQLARQLLATSEEDETAWRDNEWYVARLCPTPLRPQERRTIVADHQQSGMRLQIRTPGAIDSVAFEPAPDVEQPLRAGEVRVDVRATGVNFRDVLLALGMYPQKADMGTEAAGVVTAVGPDVDAFAPGDRVLGLFQGAFAPIAVTDHRLLARVPDGWSDADAAAVPIAYTTAHYALHDLAGLRAGQSVLIHAAAGGVGMAAVALARRAGAEVLATAGPAKHGTLRALGLDDEHIASSRETGFARKFRERTGGRGVDVVLNSLTGELLDESADLLAEDGVFVEMGKTDLRDAGDFRGRYAPFDLGEAGDDRLGEILREVVGLLGAGELDRLPVSAWELGIPQTGKSLVTLPPEQAQVFRPDGTVLITGGTGTLGRLLARHLVTEHGVRHLLLVSRRGADAPGSDELRAEIEDLGASAEIAACDTADRDALSALLDGLPRPLTGVVHAAGVLADGLVTSIDEPAVEQVLRAKVDAAWNLHELTANTGLSFFVLFSSAASVLAGPGQGVYAAANESLNALAALRRTRGLPAKALGWGLWAIGRAIAFAEQTGDAIAPEEGAYAFETLLRHNRAYSGYAPVIGSPWLTAFAQHSPFAEKFQSLGQNRSGTSKFLAELVDLPREEWPDRLRRLLELVRSHAAAVSGYGSADQLPERKAFKDLGFDSLAAVELRNRLGTATGVRLPSTLVFDHPTPLAVAEHLRDRLTSGEDNPIPLCQGDGEEMSTWLRRFGPPVEHRARLVCFPHAGAAADSYLDLARALAPEIDVHAVQYPGRQDRRDEEPLGTAGEIADEVAAVLRASGGDGPFALFGHSMGALIAYETARRLEREPGGGPLRLFVSGQTAPRVHERRTDLPGDDGLVDELRRLGTSEAALADEALLAMSLPVLRADYRVLRSYAWADGPPLRAGITALCGDADPLTATGDAERWLQHSVIPGRTRTFPGGHFYLGEQVTEVAGAVRRDLLRAGLAG

SEQ ID NO: 43 - protein, 3865 aa, Artificial Sequence
  IOO
MVAKHSLENGVFHKMTENEKELILHFNNTKTDYPKNKTLHELFEEQAMKTPDHTALVFGAQRMTYRELNEKANQTARLLREKGIGRGSIAAIIADRSFEMIIGIIGILKAGGAYLPIDPETPKDRIAFMLSDTKAAVLLTQGKAADGIDCEADIVQLDREASDGFSKEPLSSVNDSGDTAYIIYTSGSTGTPKGVITPHYSVIRVVQNTNYIDITEDNVILQLSNYSFDGSVFDIFGALLNGASLVMIEKEALLNINRLGSAINEEKVSVMFITTALFNMIADIHVDCLSNLRKILFGGERASIPHVRKVLNHVGRDKLIHVYGPTESTVYATYYFINEIDDEAETIPIGSPLANTSVLIMDEAGKLVPIGVPGELCIAGDGLSKGYLNREELTAEKFIPHPFIPGERLYKTGDLAKWLPDGNIEFIGRIDHQVKIRGFRIELGEIESRLEMHEDINETIVTVREDEESRPYICAYITANREISLDELKGFLGEKLPEYMIPAYFVKLDKLPLTKNGKVDRKALPEPDRTAGAENEYEAPRNETEEKLAAVWQDVLHVEKAGIHDHFAQMGGHSLHAMELIAKIKEKMNVEIPLHQLFKLATIKELSAFIEANGLPQEIKHTPAVRTTSEDPIAIVSMACRLPGGVNTPQRLWELLREGGETLSGFPTDRGWDLARLHHPDPDNPGTSYVDKGGFLDDAAGFDAEFFGVSPREAAAMDPQQRLLLETSWELVENAGIDPHSLRGTATGVFLGVAKFGYGEDTAAAEDVEGYSVTGVAPAVASGRISYTMGLEGPSISVDTACSSSLVALHLAVESLRKGESSMAVVGGAAVMATPGVFVDFSRQRALAADGRSKAFGAGADGFGFSEGVTLVLLERLSEARRNGHEVLAVVRGSALNQDGASNGLSAPSGPAQRRVIRQALESCGLEPGDVDAVEAHGTGTALGDPIEANALLDTYGRDRDADRPLWLGSVKSNIGHTQAAAGVTGLLKVVLALRNGELPATLHVEEPTPHVDWSSGGVALLAGNQPWRRGERTRRAAVSAFGISGTNAHVIVEEAPQEVRPAPGQGLSPAVSTLVVAGKTMQRVSATAGMLADWMEGPGADVALADVAHTLNHHRSRQPKFGTVVARDRTQAIAGLRALAAGQHAPGVVNPAEGSPGPGTVFVFPGQGSQRAGMGEELAAAFPVFARIHQQVWDLLDVPDLDVNETGYAQPALFALQVALFGLLESWGVRPDAVVGHSVGELAAGYVSGLWSLEDACTLVSARARLMQALPAGGVMAAVPVSEDEARAVLGEGVEIAAVNGPSSVVLSGDEAAVLQAAEGLGKWTRLPTSHAFHSARMEPMLEEFRAVAEGLTYRTPQVAMAAGDQVMTAEYWVRQVRDTVRFGEQVASFEDAVFVELGADRSLARLVDGIAMLHGDHEAQAADHRQITEAVADAYVLGHLPDFAALRRPHARKLDLPTYPFERRQYWFRDARERPEQPRDTGGPRTEAVRLLEDGRIEELAALLGGASDDQHTLQVLTKLAAQHNQQRTTRSIADDRYEIRWDRSTSPLSGADVDQAGSWIVVSDDADAVPPLVDLLAARNEPHQVVGLPASDADEERLAETLRAAATEDATLRIVHVAALEAGATPSMRSLLRMQHRILGGTRRVFRAAVAAELRGPIWIVTRGAQRVADTDTVAPHQSCLWGFGRAASLELPHVWGGLADLSEGGDNAADEWSALVDRIAAPHGSAVREDQLALRDRAVYTPRLARRSAPPSGTPLHLRGDGTVLITGGTGTLGRLLARHLVTEHGVRHLLLVSRRGADAPGSDELRAEIEDLGASAEIAACDTADRDALSALLDGLPRPLTGVVHAAGVLADGLVTSIDEPAVEQVLRAKVDAAWNLHELTANTGLSFFVLFSSAASVLAGPGQGVYAAANESLNALAALRRTRGLPAKALGWGLWAIGRAIAFAEQTGDAIAPEEGAYAFETLLRHNRAYSGYAPVIGSPWLTAFAQHSPFAEKFQSLGQNRSGTSKFLAELVDLPREEWPDRLRRLLELVRSHAAAVSGYGSADQLPERKAFKDLGFDSLAAVELRNRLGTATGVRLPSTLVFDHPTPLAVAEHLRDRLPGIGALVPAPVVIAAGRTEEPIAIVSMACRLPGGVNTPQRLWELLREGGETLSGFPTDRGWDLARLHHPDPDNPGTSYVDKGGFLDDAAGFDAEFFGVSPREAAAMDPQQRLLLETSWELVENAGIDPHSLRGTATGVFLGVAKFGYGEDTAAAEDVEGYSVTGVAPAVASGRISYTMGLEGPSISVDTACSSSLVALHLAVESLRKGESSMAVVGGAAVMATPGVFVDFSRQRALAADGRSKAFGAGADGFGFSEGVTLVLLERLSEARRNGHEVLAVVRGSALNQDGASNGLSAPSGPAQRRVIRQALESCGLEPGDVDAVEAHGTGTALGDPIEANALLDTYGRDRDADRPLWLGSVKSNIGHTQAAAGVTGLLKVVLALRNGELPATLHVEEPTPHVDWSSGGVALLAGNQPWRRGERTRRAAVSAFGISGTNAHVIVEEAPQEVRPAPGQGLSPAVSTLVVAGKTMQRVSATAGMLADWMEGPGADVALADVAHTLNHHRSRQPKFGTVVARDRTQAIAGLRALAAGQHAPGVVNPAEGSPGPGTVFVFPGQGSQRAGMGEELAAAFPVFARIHQQVWDLLDVPDLDVNETGYAQPALFALQVALFGLLESWGVRPDAVVGHSVGELAAGYVSGLWSLEDACTLVSARARLMQALPAGGVMAAVPVSEDEARAVLGEGVEIAAVNGPSSVVLSGDEAAVLQAAEGLGKWTRLPTSHAFHSARMEPMLEEFRAVAEGLTYRTPQVAMAAGDQVMTAEYWVRQVRDTVRFGEQVASFEDAVFVELGADRSLARLVDGIAMLHGDHEAQAADHRQITEAVADAYVLGHLPDFAALRRPHARKLDLPTYPFERRQYWFRDARERPEQPRDTGGPRTEAVRLLEDGRIEELAALLGGASDDQHTLQVLTKLAAQHNQQRTTRSIADDRYEIRWDRSTSPLSGADVDQAGSWIVVSDDADAVPPLVDLLAARNEPHQVVGLPASDADEERLAETLRAAATEDATLRIVHVAALEAGATPSMRSLLRMQHRILGGTRRVFRAAVAAELRGPIWIVTRGAQRVADTDTVAPHQSCLWGFGRAASLELPHVWGGLADLSEGGDNAADEWSALVDRIAAPHGSAVREDQLALRDRAVYTPRLARRSAPPSGTPLHLRGDGTVLITGGTGTLGRLLARHLVTEHGVRHLLLVSRRGADAPGSDELRAEIEDLGASAEIAACDTADRDALSALLDGLPRPLTGVVHAAGVLADGLVTSIDEPAVEQVLRAKVDAAWNLHELTANTGLSFFVLFSSAASVLAGPGQGVYAAANESLNALAALRRTRGLPAKALGWGLWAIGRAIAFAEQTGDAIAPEEGAYAFETLLRHNRAYSGYAPVIGSPWLTAFAQHSPFAEKFQSLGQNRSGTSKFLAELVDLPREEWPDRLRRLLELVRSHAAAVSGYGSADQLPERKAFKDLGFDSLAAVELRNRLGTATGVRLPSTLVFDHPTPLAVAEHLRDRLTSGEDNPIPLCQGDGEEMSTWLRRFGPPVEHRARLVCFPHAGAAADSYLDLARALAPEIDVHAVQYPGRQDRRDEEPLGTAGEIADEVAAVLRASGGDGPFALFGHSMGALIAYETARRLEREPGGGPLRLFVSGQTAPRVHERRTDLPGDDGLVDELRRLGTSEAALADEALLAMSLPVLRADYRVLRSYAWADGPPLRAGITALCGDADPLTATGDAERWLQHSVIPGRTRTFPGGHFYLGEQVTEVAGAVRRDLLRAGLAG

SEQ ID NO: 44 - protein, 3978 aa, Artificial Sequence
  IOS
MVAKHSLENGVFHKMTENEKELILHFNNTKTDYPKNKTLHELFEEQAMKTPDHTALVFGAQRMTYRELNEKANQTARLLREKGIGRGSIAAIIADRSFEMIIGIIGILKAGGAYLPIDPETPKDRIAFMLSDTKAAVLLTQGKAADGIDCEADIVQLDREASDGFSKEPLSSVNDSGDTAYIIYTSGSTGTPKGVITPHYSVIRVVQNTNYIDITEDNVILQLSNYSFDGSVFDIFGALLNGASLVMIEKEALLNINRLGSAINEEKVSVMFITTALFNMIADIHVDCLSNLRKILFGGERASIPHVRKVLNHVGRDKLIHVYGPTESTVYATYYFINEIDDEAETIPIGSPLANTSVLIMDEAGKLVPIGVPGELCIAGDGLSKGYLNREELTAEKFIPHPFIPGERLYKTGDLAKWLPDGNIEFIGRIDHQVKIRGFRIELGEIESRLEMHEDINETIVTVREDEESRPYICAYITANREISLDELKGFLGEKLPEYMIPAYFVKLDKLPLTKNGKVDRKALPEPDRTAGAENEYEAPRNETEEKLAAVWQDVLHVEKAGIHDHFAQMGGHSLHAMELIAKIKEKMNVEIPLHQLFKLATIKELSAFIEANGLPQEIKHTPAVRTTSEDPIAIVSMACRLPGGVNTPQRLWELLREGGETLSGFPTDRGWDLARLHHPDPDNPGTSYVDKGGFLDDAAGFDAEFFGVSPREAAAMDPQQRLLLETSWELVENAGIDPHSLRGTATGVFLGVAKFGYGEDTAAAEDVEGYSVTGVAPAVASGRISYTMGLEGPSISVDTACSSSLVALHLAVESLRKGESSMAVVGGAAVMATPGVFVDFSRQRALAADGRSKAFGAGADGFGFSEGVTLVLLERLSEARRNGHEVLAVVRGSALNQDGASNGLSAPSGPAQRRVIRQALESCGLEPGDVDAVEAHGTGTALGDPIEANALLDTYGRDRDADRPLWLGSVKSNIGHTQAAAGVTGLLKVVLALRNGELPATLHVEEPTPHVDWSSGGVALLAGNQPWRRGERTRRAAVSAFGISGTNAHVIVEEAPQEVRPAPGQGLSPAVSTLVVAGKTMQRVSATAGMLADWMEGPGADVALADVAHTLNHHRSRQPKFGTVVARDRTQAIAGLRALAAGQHAPGVVNPAEGSPGPGTVFVFPGQGSQRAGMGEELAAAFPVFARIHQQVWDLLDVPDLDVNETGYAQPALFALQVALFGLLESWGVRPDAVVGHSVGELAAGYVSGLWSLEDACTLVSARARLMQALPAGGVMAAVPVSEDEARAVLGEGVEIAAVNGPSSVVLSGDEAAVLQAAEGLGKWTRLPTSHAFHSARMEPMLEEFRAVAEGLTYRTPQVAMAAGDQVMTAEYWVRQVRDTVRFGEQVASFEDAVFVELGADRSLARLVDGIAMLHGDHEAQAADHRQITEAVADAYVLGHLPDFAALRRPHARKLDLPTYPFERRQYWFRDARERPEQPRDTGGPRTEAVRLLEDGRIEELAALLGGASDDQHTLQVLTKLAAQHNQQRTTRSIADDRYEIRWDRSTSPLSGADVDQAGSWIVVSDDADAVPPLVDLLAARNEPHQVVGLPASDADEERLAETLRAAATEDATLRIVHVAALEAGATPSMRSLLRMQHRILGGTRRVFRAAVAAELRGPIWIVTRGAQRVADTDTVAPHQSCLWGFGRAASLELPHVWGGLADLSEGGDNAADEWSALVDRIAAPHGSAVREDQLALRDRAVYTPRLARRSAPPSGTPLHLRGDGTVLITGGTGTLGRLLARHLVTEHGVRHLLLVSRRGADAPGSDELRAEIEDLGASAEIAACDTADRDALSALLDGLPRPLTGVVHAAGVLADGLVTSIDEPAVEQVLRAKVDAAWNLHELTANTGLSFFVLFSSAASVLAGPGQGVYAAANESLNALAALRRTRGLPAKALGWGLWAIGRAIAFAEQTGDAIAPEEGAYAFETLLRHNRAYSGYAPVIGSPWLTAFAQHSPFAEKFQSLGQNRSGTSKFLAELVDLPREEWPDRLRRLLELVRSHAAAVSGYGSADQLPERKAFKDLGFDSLAAVELRNRLGTATGVRLPSTLVFDHPTPLAVAEHLRDRLLPVEQPFVHSPEERYRPFALTDVQQAYLVGRQPGFALGGVGSHFFVEFEIADLDIHRLEKVWNRLIARHDMLRAVVRDGQQRVLEQTPPWVIPAHILHSPEEALQVRDRLAHQVLNPEVWPVFDLQVGFVDGMPARLWLCLDNLLLDGLSMQILLSELEHGYRYPQQLPPPLPITFRDYLQQPALRTPNPDSLAWWQTQLDDIPPAPALPLRCLPQDVETPRFARLYGAMDSARWRRLKQRAADAHLTPSAVLLSVWSTVLAAWSAQPDFTLNLTLFDRRPLHPQINQILGDFTSLMLLSWHPGESWLQSARLLQQRLSESLNHRDVSAIRVMRQLARRQNVPAVPMPVVFTSALGFEQDNFLARRNLLKPVWGISQTPQVWLDHQVYESEGELRFNWDFVAALFPDGQVERQFAQYCALLNRMAEDDSSWQLPLADLVPPLKVTERRARRLRPERAQPRIAADKSSVSLICDTFREVVGEPVAPAENFFEAGATSLNLVQLHVLLQRHEFATLTLLDLFTHPSPVALANYLAGVALEEKTKRVRPVRRRQRRIQHLPLVAAQPGIWMAEKLSELPSAWSVAHYVELTGEVDSPLLARAVVAGLAQADTLRMRFTEDNGEVWQWVDDALTFELPEIIDLRTNIDPHGTAQALMQADLQQDLRVDSGKPLVFHQLIQVADNRWYWYQRYHHLLVDGFSFPAITRQIANIYCTWLRGEPTPASPFTPFADVVEEYQQYRESEAWQRDAAFWAEQRRQLPPPASLSPAPLPGRSASADILRLKLEFTDGEFRQLATQLSGVQRTDLALALAALWLGRLCNRMDYAAGFIFMRRLGSAALTATGPVLNVLPLGIHIGNPSFSELLTRVREVALGAYAHQHIPFEMLVEALQPERNLSHTPLFQVMFVLQNAPASQLELTGITANPIKVKSTTTKFDLTLIMQNTASGLVGVWEYNTDLFDASTIERMTGHFVTLLEGVIANPQQPISQLPILTTVEQQQLLVEWNNTQTDYPADKCIHQLFEEQVERTPDAVAVVFGNQQLSYREMREQVVALANLLRERGVKPGDSVAVALPRSVFLTLALHAIVEAGAAWLPLDTGYPDDRLKMMLEDARPSLLITTDDQLPRFSDVPNLTSLCYNAPLTPQGSAPLQLSQPHHTAYIIFTSGSTGRPKGVMVGQTAIVNRLLWMQNHYPLTGEDVVAQKTPCSFDVSVWEFFWPFIAGAKLVMAEPEAHRDPLAMQQFFAEYGVTTTHFVPSMLAAFVASLTPQTARQSCATLKQVFCSGEALPADLCREWQQLTGAPLHNLYGPTEAAVDVSWYPAFGEELAQVRGSSVPIGYPVWNTGLRILDAMMHPVPPGVAGDLYLTGIQLAQGYLGRPDLTASRFIADPFAPGERMYRTGDVARWLDNGAVEYLGRSDDQLKIRGQRIELGEIDRVMQALPDVEQAVASCAIAREDIPGNKHLVAYIVPQEEQTCTERSRSTLTVSFVRSFLKEKLPEYMVPSAIVILDALPLTPNGKLDRRALPAPDLHSQLETIIAAAFSSLLGCDVQDADADFFALGGHSLLAMKLAAQLSRQVARQVTPGQVMVASTVAKLATIIDAELDKYVAPRNPITSGEDNPIPLCQGDGEEMSTWLRRFGPPVEHRARLVCFPHAGAAADSYLDLARALAPEIDVHAVQYPGRQDRRDEEPLGTAGEIADEVAAVLRASGGDGPFALFGHSMGALIAYETARRLEREPGGGPLRLFVSGQTAPRVHERRTDLPGDDGLVDELRRLGTSEAALADEALLAMSLPVLRADYRVLRSYAWADGPPLRAGITALCGDADPLTATGDAERWLQHSVIPGRTRTFPGGHFYLGEQVTEVAGAVRRDLLRAGLAG

SEQ ID NO: 45 - protein, 4093 aa, Artificial Sequence
  ISC
MVAKHSLENGVFHKMTENEKELILHFNNTKTDYPKNKTLHELFEEQAMKTPDHTALVFGAQRMTYRELNEKANQTARLLREKGIGRGSIAAIIADRSFEMIIGIIGILKAGGAYLPIDPETPKDRIAFMLSDTKAAVLLTQGKAADGIDCEADIVQLDREASDGFSKEPLSSVNDSGDTAYIIYTSGSTGTPKGVITPHYSVIRVVQNTNYIDITEDNVILQLSNYSFDGSVFDIFGALLNGASLVMIEKEALLNINRLGSAINEEKVSVMFITTALFNMIADIHVDCLSNLRKILFGGERASIPHVRKVLNHVGRDKLIHVYGPTESTVYATYYFINEIDDEAETIPIGSPLANTSVLIMDEAGKLVPIGVPGELCIAGDGLSKGYLNREELTAEKFIPHPFIPGERLYKTGDLAKWLPDGNIEFIGRIDHQVKIRGFRIELGEIESRLEMHEDINETIVTVREDEESRPYICAYITANREISLDELKGFLGEKLPEYMIPAYFVKLDKLPLTKNGKVDRKALPEPDRTAGAENEYEAPRNETEEKLAAVWQDVLHVEKAGIHDHFAQMGGHSLHAMELIAKIKEKMNVEIPLHQLFKLATIKELSAFIEANVPVEQPFVHSPEDRYQPFALTDVQQAYLVGRQPGFALGGVGSHFFVEFEIADLDLTRLETVWNRLIARHDMLRAIVRDGQQQVLEQTPPWVIPAHTLHTPEEALRVREKLAHQVLNPEVWPVFDLQVGYVDGMPARLWLCLDNLLLDGLSMQILLAELEHGYRYPQQLLPPLPVTFRDYLQQPSLQSPNPDSLAWWQAQLDDIPPAPALPLRCLPQEVETPRFARLNGALDSTRWHRLKKRAADAHLTPSAVLLSVWSTVLSAWSAQPEFTLNLTLFDRRPLHPQINQILGDFTSLMLLSWHPGESWLHSAQSLQQRLSQNLNHRDVSAIRVMRQLAQQQNVPAVPMPVVFTSALGFEQDNFLARRNLLKPVWGISQTPQVWLDHQIYESEGELRFNWDFVAALFPAGQVERQFEQYCALLNRMAEDESGWQLPLAALVPPVKHAGQCAERSPRVCPEQSQPHIAADESTVSLICDAFREVVGESVTPAENFFEAGATSLNLVQLHVLLQRHEFSTLTLLDLFTHPSPAALADYLAGVATVEKTKRPRPVRRRQRRIQHLPLVAAQPGIWMAEKLSELPSAWSVAHYVELTGEVDSPLLARAVVAGLAQADTLRMRFTEDNGEVWQWVDDALTFELPEIIDLRTNIDPHGTAQALMQADLQQDLRVDSGKPLVFHQLIQVADNRWYWYQRYHHLLVDGFSFPAITRQIANIYCTWLRGEPTPASPFTPFADVVEEYQQYRESEAWQRDAAFWAEQRRQLPPPASLSPAPLPGRSASADILRLKLEFTDGEFRQLATQLSGVQRTDLALALAALWLGRLCNRMDYAAGFIFMRRLGSAALTATGPVLNVLPLGIHIGNPSFSELLTRVREVALGAYAHQHIPFEMLVEALQPERNLSHTPLFQVMFVLQNAPASQLELTGITANPIKVKSTTTKFDLTLIMQNTASGLVGVWEYNTDLFDASTIERMTGHFVTLLEGVIANPQQPISQLPILTTVEQQQLLVEWNNTQTDYPADKCIHQLFEEQVERTPDAVAVVFGNQQLSYREMREQVVALANLLRERGVKPGDSVAVALPRSVFLTLALHAIVEAGAAWLPLDTGYPDDRLKMMLEDARPSLLITTDDQLPRFSDVPNLTSLCYNAPLTPQGSAPLQLSQPHHTAYIIFTSGSTGRPKGVMVGQTAIVNRLLWMQNHYPLTGEDVVAQKTPCSFDVSVWEFFWPFIAGAKLVMAEPEAHRDPLAMQQFFAEYGVTTTHFVPSMLAAFVASLTPQTARQSCATLKQVFCSGEALPADLCREWQQLTGAPLHNLYGPTEAAVDVSWYPAFGEELAQVRGSSVPIGYPVWNTGLRILDAMMHPVPPGVAGDLYLTGIQLAQGYLGRPDLTASRFIADPFAPGERMYRTGDVARWLDNGAVEYLGRSDDQLKIRGQRIELGEIDRVMQALPDVEQAVASCAIAREDIPGNKHLVAYIVPQEEQTCTERSRSTLTVSFVRSFLKEKLPEYMVPSAIVILDALPLTPNGKLDRRALPAPDLHSQLETIIAAAFSSLLGCDVQDADADFFALGGHSLLAMKLAAQLSRQVARQVTPGQVMVASTVAKLATIIDAELDKYVAPRNPILPVEQPFVHSPEERYRPFALTDVQQAYLVGRQPGFALGGVGSHFFVEFEIADLDIHRLEKVWNRLIARHDMLRAVVRDGQQRVLEQTPPWVIPAHILHSPEEALQVRDRLAHQVLNPEVWPVFDLQVGFVDGMPARLWLCLDNLLLDGLSMQILLSELEHGYRYPQQLPPPLPITFRDYLQQPALRTPNPDSLAWWQTQLDDIPPAPALPLRCLPQDVETPRFARLYGAMDSARWRRLKQRAADAHLTPSAVLLSVWSTVLAAWSAQPDFTLNLTLFDRRPLHPQINQILGDFTSLMLLSWHPGESWLQSARLLQQRLSESLNHRDVSAIRVMRQLARRQNVPAVPMPVVFTSALGFEQDNFLARRNLLKPVWGISQTPQVWLDHQVYESEGELRFNWDFVAALFPDGQVERQFAQYCALLNRMAEDDSSWQLPLADLVPPLKVTERRARRLRPERAQPRIAADKSSVSLICDTFREVVGEPVAPAENFFEAGATSLNLVQLHVLLQRHEFATLTLLDLFTHPSPVALANYLAGVALEEKTKRVRPVRRRQRRIGEPFPLAPMQHAMWVGRHDHQQLGGVAGHLYVEFDGARVDPDRLRAAATRLALRHPMLRVQFLPDGTQRIPPAAGSRDFPISVADLRHVAPDVVDQRLAGIRDAKSHQQLDGAVFELALTLLPGERTRLHVDLDMQAADAMSYRILLADLAALYDGREPPALGYTYREYRQAIEAEETLPQPVRDADRDWWAQRIPQLPDPPALPTRAGGERDRRRSTRRWHWLDPQTRDALFARARARGITPAMTLAAAFANVLARWSASSRFLLNLPLFSRQALHPDVDLLVGDFTSSLLLDVDLGDTVSNLARKNQLTFTEDWEHRHWSGVELLRELKRQQRYPHGAPVVFTSNLGRSLYSSRAESPLGEPEWGISQTPQVWIDHLAFEHHGEVWLQWDSNDALFPPALVETLFDAYCQLINQLCDDESAWQKPFADMMPASQRAIRERVNATGAPIPEGLLHEGIFRIALQQPQALAVTDMRYQWNSYREMREQVVALANLLRERGVKPGDSVAVALPRSVFLTLALHAIVEAGAAWLPLDTGYPDDRLKMMLEDARPSLLITTDDQLPRFSDVPNLTSLCYNAPLTPQGSAPLQLSQPHHTAYIIFTSGSTGRPKGVMVGQTAIVNRLLWMQNHYPLTGEDVVAQKTPCSFDVSVWEFFWPFIAGAKLVMAEPEAHRDPLAMQQFFAEYGVTTTHFVPSMLAAFVASLTPQTARQSCATLKQVFCSGEALPADLCREWQQLTGAPLHNLYGPTEAAVDVSWYPAFGEELAQVRGSSVPIGYPVWNTGLRILDAMMHPVPPGVAGDLYLTGIQLAQGYLGRPDLTASRFIADPFAPGERMYRTGDVARWLDNGAVEYLGRSDDQLKIRGQRIELGEIDRVMQALPDVEQAVASCAIAREDIPGNKHLVAYIVPQEEQTCTERSRSTLTVSFVRSFLKEKLPEYMVPSAIVILDALPLTPNGKLDRRALPAPDLHSQLLDKYVAPRNPIETIIAAAFSSLLGCDVQDADADFFALGGHSLLAMKLAAQLSRQVARQVTPGQVMVASTVAKLATIIDAETSGEDNPIPLCQGDGEEMSTWLRRFGPPVEHRARLVCFPHAGAAADSYLDLARALAPEIDVHAVQYPGRQDRRDEEPLGTAGEIADEVAAVLRASGGDGPFALFGHSMGALIAYETARRLEREPGGGPLRLFVSGQTAPRVHERRTDLPGDDGLVDELRRLGTSEAALADEALLAMSLPVLRADYRVLRSYAWADGPPLRAGITALCGDADPLTATGDAERWLQHSVIPGRTRTFPGGHFYLGEQVTEVAGAVRRDLLRAGLAG

SEQ ID NO: 46 - protein, 4534 aa, Artificial Sequence
  ISH
MVAKHSLENGVFHKMTENEKELILHFNNTKTDYPKNKTLHELFEEQAMKTPDHTALVFGAQRMTYRELNEKANQTARLLREKGIGRGSIAAIIADRSFEMIIGIIGILKAGGAYLPIDPETPKDRIAFMLSDTKAAVLLTQGKAADGIDCEADIVQLDREASDGFSKEPLSSVNDSGDTAYIIYTSGSTGTPKGVITPHYSVIRVVQNTNYIDITEDNVILQLSNYSFDGSVFDIFGALLNGASLVMIEKEALLNINRLGSAINEEKVSVMFITTALFNMIADIHVDCLSNLRKILFGGERASIPHVRKVLNHVGRDKLIHVYGPTESTVYATYYFINEIDDEAETIPIGSPLANTSVLIMDEAGKLVPIGVPGELCIAGDGLSKGYLNREELTAEKFIPHPFIPGERLYKTGDLAKWLPDGNIEFIGRIDHQVKIRGFRIELGEIESRLEMHEDINETIVTVREDEESRPYICAYITANREISLDELKGFLGEKLPEYMIPAYFVKLDKLPLTKNGKVDRKALPEPDRTAGAENEYEAPRNETEEKLAAVWQDVLHVEKAGIHDHFAQMGGHSLHAMELIAKIKEKMNVEIPLHQLFKLATIKELSAFIEANVPVEQPFVHSPEDRYQPFALTDVQQAYLVGRQPGFALGGVGSHFFVEFEIADLDLTRLETVWNRLIARHDMLRAIVRDGQQQVLEQTPPWVIPAHTLHTPEEALRVREKLAHQVLNPEVWPVFDLQVGYVDGMPARLWLCLDNLLLDGLSMQILLAELEHGYRYPQQLLPPLPVTFRDYLQQPSLQSPNPDSLAWWQAQLDDIPPAPALPLRCLPQEVETPRFARLNGALDSTRWHRLKKRAADAHLTPSAVLLSVWSTVLSAWSAQPEFTLNLTLFDRRPLHPQINQILGDFTSLMLLSWHPGESWLHSAQSLQQRLSQNLNHRDVSAIRVMRQLAQQQNVPAVPMPVVFTSALGFEQDNFLARRNLLKPVWGISQTPQVWLDHQIYESEGELRFNWDFVAALFPAGQVERQFEQYCALLNRMAEDESGWQLPLAALVPPVKHAGQCAERSPRVCPEQSQPHIAADESTVSLICDAFREVVGESVTPAENFFEAGATSLNLVQLHVLLQRHEFSTLTLLDLFTHPSPAALADYLAGVATVEKTKRPRPVRRRQRRIQHLPLVAAQPGIWMAEKLSELPSAWSVAHYVELTGEVDSPLLARAVVAGLAQADTLRMRFTEDNGEVWQWVDDALTFELPEIIDLRTNIDPHGTAQALMQADLQQDLRVDSGKPLVFHQLIQVADNRWYWYQRYHHLLVDGFSFPAITRQIANIYCTWLRGEPTPASPFTPFADVVEEYQQYRESEAWQRDAAFWAEQRRQLPPPASLSPAPLPGRSASADILRLKLEFTDGEFRQLATQLSGVQRTDLALALAALWLGRLCNRMDYAAGFIFMRRLGSAALTATGPVLNVLPLGIHIGNPSFSELLTRVREVALGAYAHQHIPFEMLVEALQPERNLSHTPLFQVMFVLQNAPASQLELTGITANPIKVKSTTTKFDLTLIMQNTASGLVGVWEYNTDLFDASTIERMTGHFVTLLEGVIANPQQPISQLPILTTVEQQQLLVEWNNTQTDYPADKCIHQLFEEQVERTPDAVAVVFGNQQLSYREMREQVVALANLLRERGVKPGDSVAVALPRSVFLTLALHAIVEAGAAWLPLDTGYPDDRLKMMLEDARPSLLITTDDQLPRFSDVPNLTSLCYNAPLTPQGSAPLQLSQPHHTAYIIFTSGSTGRPKGVMVGQTAIVNRLLWMQNHYPLTGEDVVAQKTPCSFDVSVWEFFWPFIAGAKLVMAEPEAHRDPLAMQQFFAEYGVTTTHFVPSMLAAFVASLTPQTARQSCATLKQVFCSGEALPADLCREWQQLTGAPLHNLYGPTEAAVDVSWYPAFGEELAQVRGSSVPIGYPVWNTGLRILDAMMHPVPPGVAGDLYLTGIQLAQGYLGRPDLTASRFIADPFAPGERMYRTGDVARWLDNGAVEYLGRSDDQLKIRGQRIELGEIDRVMQALPDVEQAVASCAIAREDIPGNKHLVAYIVPQEEQTCTERSRSTLTVSFVRSFLKEKLPEYMVPSAIVILDALPLTPNGKLDRRALPAPDLHSQLETIIAAAFSSLLGCDVQDADADFFALGGHSLLAMKLAAQLSRQVARQVTPGQVMVASTVAKLATIIDAELDKYVAPRNPIPGIGALVPAPVVIAAGRTEEPIAIVSMACRLPGGVNTPQRLWELLREGGETLSGFPTDRGWDLARLHHPDPDNPGTSYVDKGGFLDDAAGFDAEFFGVSPREAAAMDPQQRLLLETSWELVENAGIDPHSLRGTATGVFLGVAKFGYGEDTAAAEDVEGYSVTGVAPAVASGRISYTMGLEGPSISVDTACSSSLVALHLAVESLRKGESSMAVVGGAAVMATPGVFVDFSRQRALAADGRSKAFGAGADGFGFSEGVTLVLLERLSEARRNGHEVLAVVRGSALNQDGASNGLSAPSGPAQRRVIRQALESCGLEPGDVDAVEAHGTGTALGDPIEANALLDTYGRDRDADRPLWLGSVKSNIGHTQAAAGVTGLLKVVLALRNGELPATLHVEEPTPHVDWSSGGVALLAGNQPWRRGERTRRAAVSAFGISGTNAHVIVEEAPQEVRPAPGQGLSPAVSTLVVAGKTMQRVSATAGMLADWMEGPGADVALADVAHTLNHHRSRQPKFGTVVARDRTQAIAGLRALAAGQHAPGVVNPAEGSPGPGTVFVFPGQGSQRAGMGEELAAAFPVFARIHQQVWDLLDVPDLDVNETGYAQPALFALQVALFGLLESWGVRPDAVVGHSVGELAAGYVSGLWSLEDACTLVSARARLMQALPAGGVMAAVPVSEDEARAVLGEGVEIAAVNGPSSVVLSGDEAAVLQAAEGLGKWTRLPTSHAFHSARMEPMLEEFRAVAEGLTYRTPQVAMAAGDQVMTAEYWVRQVRDTVRFGEQVASFEDAVFVELGADRSLARLVDGIAMLHGDHEAQAGMRREQPLPLGLRRLLTDLHNAGAAVDFSVLCPQGRLVDAPLPAWSHRFLFYDREGVDNRSPGGSTVAVHPLLLAAVDVPGHGGAVFTGRLSTDEQPWLAEHVVGGRTLVPGSVLVDLALAAGEDVGLPVLEELVLQRPLVLAGAGALLRMSVGAPDESGRRTIDVHAAEDVADLADAQWSQHATGTLAQGVAAGPRDTEQWPPEDAVRIPLDDHYDGLAEQGYEYGPSFQALVAYVAEDATATMLAEVALPGSIRSQQGLYAIHPALLDACFQSVGAHPDSQSVGSGLLVPLGVRRVRAYAPVRTARYCYTRVTKVELAGVEADIDVLDAHGTVLLAVCGLRIGTGVSERDKHNRVLNERLLTIEWHQRELPEMDPSGAGKWLLISDCAASDVTATRLADAFREHSAACTTMRWPLHDDQLAAADQLRDQVGSDEFSGVVVLTGPNTGTPHQGSADRGAEYVRRLVGIARELSDLPGAVPRMYVVTRGAQRVLADDCVNLEQGGLRGLLRTIGAEHPHLRATQIDVDEQTGVEQLARQLLATSEEDETAWRDNEWYVARLCPTPLRPQERRTIVADHQQSGMRLQIRTPGAIDSVAFEPAPDVEQPLRAGEVRVDVRATGVNFRDVLLALGMYPQKADMGTEAAGVVTAVGPDVDAFAPGDRVLGLFQGAFAPIAVTDHRLLARVPDGWSDADAAAVPIAYTTAHYALHDLAGLRAGQSVLIHAAAGGVGMAAVALARRAGAEVLATAGPAKHGTLRALGLDDEHIASSRETGFARKFRERTGGRGVDVVLNSLTGELLDESADLLAEDGVFVEMGKTDLRDAGDFRGRYAPFDLGEAGDDRLGEILREVVGLLGAGELDRLPVSAWELGIPQTGKSLVTLPPEQAQVFRPDGTVLITGGTGTLGRLLARHLVTEHGVRHLLLVSRRGADAPGSDELRAEIEDLGASAEIAACDTADRDALSALLDGLPRPLTGVVHAAGVLADGLVTSIDEPAVEQVLRAKVDAAWNLHELTANTGLSFFVLFSSAASVLAGPGQGVYAAANESLNALAALRRTRGLPAKALGWGLWAIGRAIAFAEQTGDAIAPEEGAYAFETLLRHNRAYSGYAPVIGSPWLTAFAQHSPFAEKFQSLGQNRSGTSKFLAELVDLPREEWPDRLRRLLELVRSHAAAVSGYGSADQLPERKAFKDLGFDSLAAVELRNRLGTATGVRLPSTLVFDHPTPLAVAEHLRDRLTSGEDNPIPLCQGDGEEMSTWLRRFGPPVEHRARLVCFPHAGAAADSYLDLARALAPEIDVHAVQYPGRQDRRDEEPLGTAGEIADEVAAVLRASGGDGPFALFGHSMGALIAYETARRLEREPGGGPLRLFVSGQTAPRVHERRTDLPGDDGLVDELRRLGTSEAALADEALLAMSLPVLRADYRVLRSYAWADGPPLRAGITALCGDADPLTATGDAERWLQHSVIPGRTRTFPGGHFYLGEQVTEVAGAVRRDLLRAGLAG

SEQ ID NO: 47 - protein, 3983 aa, Artificial Sequence
  ISO
MVAKHSLENGVFHKMTENEKELILHFNNTKTDYPKNKTLHELFEEQAMKTPDHTALVFGAQRMTYRELNEKANQTARLLREKGIGRGSIAAIIADRSFEMIIGIIGILKAGGAYLPIDPETPKDRIAFMLSDTKAAVLLTQGKAADGIDCEADIVQLDREASDGFSKEPLSSVNDSGDTAYIIYTSGSTGTPKGVITPHYSVIRVVQNTNYIDITEDNVILQLSNYSFDGSVFDIFGALLNGASLVMIEKEALLNINRLGSAINEEKVSVMFITTALFNMIADIHVDCLSNLRKILFGGERASIPHVRKVLNHVGRDKLIHVYGPTESTVYATYYFINEIDDEAETIPIGSPLANTSVLIMDEAGKLVPIGVPGELCIAGDGLSKGYLNREELTAEKFIPHPFIPGERLYKTGDLAKWLPDGNIEFIGRIDHQVKIRGFRIELGEIESRLEMHEDINETIVTVREDEESRPYICAYITANREISLDELKGFLGEKLPEYMIPAYFVKLDKLPLTKNGKVDRKALPEPDRTAGAENEYEAPRNETEEKLAAVWQDVLHVEKAGIHDHFAQMGGHSLHAMELIAKIKEKMNVEIPLHQLFKLATIKELSAFIEANVPVEQPFVHSPEDRYQPFALTDVQQAYLVGRQPGFALGGVGSHFFVEFEIADLDLTRLETVWNRLIARHDMLRAIVRDGQQQVLEQTPPWVIPAHTLHTPEEALRVREKLAHQVLNPEVWPVFDLQVGYVDGMPARLWLCLDNLLLDGLSMQILLAELEHGYRYPQQLLPPLPVTFRDYLQQPSLQSPNPDSLAWWQAQLDDIPPAPALPLRCLPQEVETPRFARLNGALDSTRWHRLKKRAADAHLTPSAVLLSVWSTVLSAWSAQPEFTLNLTLFDRRPLHPQINQILGDFTSLMLLSWHPGESWLHSAQSLQQRLSQNLNHRDVSAIRVMRQLAQQQNVPAVPMPVVFTSALGFEQDNFLARRNLLKPVWGISQTPQVWLDHQIYESEGELRFNWDFVAALFPAGQVERQFEQYCALLNRMAEDESGWQLPLAALVPPVKHAGQCAERSPRVCPEQSQPHIAADESTVSLICDAFREVVGESVTPAENFFEAGATSLNLVQLHVLLQRHEFSTLTLLDLFTHPSPAALADYLAGVATVEKTKRPRPVRRRQRRIQHLPLVAAQPGIWMAEKLSELPSAWSVAHYVELTGEVDSPLLARAVVAGLAQADTLRMRFTEDNGEVWQWVDDALTFELPEIIDLRTNIDPHGTAQALMQADLQQDLRVDSGKPLVFHQLIQVADNRWYWYQRYHHLLVDGFSFPAITRQIANIYCTWLRGEPTPASPFTPFADVVEEYQQYRESEAWQRDAAFWAEQRRQLPPPASLSPAPLPGRSASADILRLKLEFTDGEFRQLATQLSGVQRTDLALALAALWLGRLCNRMDYAAGFIFMRRLGSAALTATGPVLNVLPLGIHIGNPSFSELLTRVREVALGAYAHQHIPFEMLVEALQPERNLSHTPLFQVMFVLQNAPASQLELTGITANPIKVKSTTTKFDLTLIMQNTASGLVGVWEYNTDLFDASTIERMTGHFVTLLEGVIANPQQPISQLPILTTVEQQQLLVEWNNTQTDYPADKCIHQLFEEQVERTPDAVAVVFGNQQLSYREMREQVVALANLLRERGVKPGDSVAVALPRSVFLTLALHAIVEAGAAWLPLDTGYPDDRLKMMLEDARPSLLITTDDQLPRFSDVPNLTSLCYNAPLTPQGSAPLQLSQPHHTAYIIFTSGSTGRPKGVMVGQTAIVNRLLWMQNHYPLTGEDVVAQKTPCSFDVSVWEFFWPFIAGAKLVMAEPEAHRDPLAMQQFFAEYGVTTTHFVPSMLAAFVASLTPQTARQSCATLKQVFCSGEALPADLCREWQQLTGAPLHNLYGPTEAAVDVSWYPAFGEELAQVRGSSVPIGYPVWNTGLRILDAMMHPVPPGVAGDLYLTGIQLAQGYLGRPDLTASRFIADPFAPGERMYRTGDVARWLDNGAVEYLGRSDDQLKIRGQRIELGEIDRVMQALPDVEQAVASCAIAREDIPGNKHLVAYIVPQEEQTCTERSRSTLTVSFVRSFLKEKLPEYMVPSAIVILDALPLTPNGKLDRRALPAPDLHSQLETIIAAAFSSLLGCDVQDADADFFALGGHSLLAMKLAAQLSRQVARQVTPGQVMVASTVAKLATIIDAELDKYVAPRNPIPGIGALVPAPVVIAAGRTEEPIAIVSMACRLPGGVNTPQRLWELLREGGETLSGFPTDRGWDLARLHHPDPDNPGTSYVDKGGFLDDAAGFDAEFFGVSPREAAAMDPQQRLLLETSWELVENAGIDPHSLRGTATGVFLGVAKFGYGEDTAAAEDVEGYSVTGVAPAVASGRISYTMGLEGPSISVDTACSSSLVALHLAVESLRKGESSMAVVGGAAVMATPGVFVDFSRQRALAADGRSKAFGAGADGFGFSEGVTLVLLERLSEARRNGHEVLAVVRGSALNQDGASNGLSAPSGPAQRRVIRQALESCGLEPGDVDAVEAHGTGTALGDPIEANALLDTYGRDRDADRPLWLGSVKSNIGHTQAAAGVTGLLKVVLALRNGELPATLHVEEPTPHVDWSSGGVALLAGNQPWRRGERTRRAAVSAFGISGTNAHVIVEEAPQEVRPAPGQGLSPAVSTLVVAGKTMQRVSATAGMLADWMEGPGADVALADVAHTLNHHRSRQPKFGTVVARDRTQAIAGLRALAAGQHAPGVVNPAEGSPGPGTVFVFPGQGSQRAGMGEELAAAFPVFARIHQQVWDLLDVPDLDVNETGYAQPALFALQVALFGLLESWGVRPDAVVGHSVGELAAGYVSGLWSLEDACTLVSARARLMQALPAGGVMAAVPVSEDEARAVLGEGVEIAAVNGPSSVVLSGDEAAVLQAAEGLGKWTRLPTSHAFHSARMEPMLEEFRAVAEGLTYRTPQVAMAAGDQVMTAEYWVRQVRDTVRFGEQVASFEDAVFVELGADRSLARLVDGIAMLHGDHEAQAADHRQITEAVADAYVLGHLPDFAALRRPHARKLDLPTYPFERRQYWFRDARERPEQPRDTGGPRTEAVRLLEDGRIEELAALLGGASDDQHTLQVLTKLAAQHNQQRTTRSIADDRYEIRWDRSTSPLSGADVDQAGSWIVVSDDADAVPPLVDLLAARNEPHQVVGLPASDADEERLAETLRAAATEDATLRIVHVAALEAGATPSMRSLLRMQHRILGGTRRVFRAAVAAELRGPIWIVTRGAQRVADTDTVAPHQSCLWGFGRAASLELPHVWGGLADLSEGGDNAADEWSALVDRIAAPHGSAVREDQLALRDRAVYTPRLARRSAPPSGTPLHLRGDGTVLITGGTGTLGRLLARHLVTEHGVRHLLLVSRRGADAPGSDELRAEIEDLGASAEIAACDTADRDALSALLDGLPRPLTGVVHAAGVLADGLVTSIDEPAVEQVLRAKVDAAWNLHELTANTGLSFFVLFSSAASVLAGPGQGVYAAANESLNALAALRRTRGLPAKALGWGLWAIGRAIAFAEQTGDAIAPEEGAYAFETLLRHNRAYSGYAPVIGSPWLTAFAQHSPFAEKFQSLGQNRSGTSKFLAELVDLPREEWPDRLRRLLELVRSHAAAVSGYGSADQLPERKAFKDLGFDSLAAVELRNRLGTATGVRLPSTLVFDHPTPLAVAEHLRDRLTSGEDNPIPLCQGDGEEMSTWLRRFGPPVEHRARLVCFPHAGAAADSYLDLARALAPEIDVHAVQYPGRQDRRDEEPLGTAGEIADEVAAVLRASGGDGPFALFGHSMGALIAYETARRLEREPGGGPLRLFVSGQTAPRVHERRTDLPGDDGLVDELRRLGTSEAALADEALLAMSLPVLRADYRVLRSYAWADGPPLRAGITALCGDADPLTATGDAERWLQHSVIPGRTRTFPGGHFYLGEQVTEVAGAVRRDLLRAGLAG

SEQ ID NO: 48 - protein, 4096 aa, Artificial Sequence
  ISS
MVAKHSLENGVFHKMTENEKELILHFNNTKTDYPKNKTLHELFEEQAMKTPDHTALVFGAQRMTYRELNEKANQTARLLREKGIGRGSIAAIIADRSFEMIIGIIGILKAGGAYLPIDPETPKDRIAFMLSDTKAAVLLTQGKAADGIDCEADIVQLDREASDGFSKEPLSSVNDSGDTAYIIYTSGSTGTPKGVITPHYSVIRVVQNTNYIDITEDNVILQLSNYSFDGSVFDIFGALLNGASLVMIEKEALLNINRLGSAINEEKVSVMFITTALFNMIADIHVDCLSNLRKILFGGERASIPHVRKVLNHVGRDKLIHVYGPTESTVYATYYFINEIDDEAETIPIGSPLANTSVLIMDEAGKLVPIGVPGELCIAGDGLSKGYLNREELTAEKFIPHPFIPGERLYKTGDLAKWLPDGNIEFIGRIDHQVKIRGFRIELGEIESRLEMHEDINETIVTVREDEESRPYICAYITANREISLDELKGFLGEKLPEYMIPAYFVKLDKLPLTKNGKVDRKALPEPDRTAGAENEYEAPRNETEEKLAAVWQDVLHVEKAGIHDHFAQMGGHSLHAMELIAKIKEKMNVEIPLHQLFKLATIKELSAFIEANVPVEQPFVHSPEDRYQPFALTDVQQAYLVGRQPGFALGGVGSHFFVEFEIADLDLTRLETVWNRLIARHDMLRAIVRDGQQQVLEQTPPWVIPAHTLHTPEEALRVREKLAHQVLNPEVWPVFDLQVGYVDGMPARLWLCLDNLLLDGLSMQILLAELEHGYRYPQQLLPPLPVTFRDYLQQPSLQSPNPDSLAWWQAQLDDIPPAPALPLRCLPQEVETPRFARLNGALDSTRWHRLKKRAADAHLTPSAVLLSVWSTVLSAWSAQPEFTLNLTLFDRRPLHPQINQILGDFTSLMLLSWHPGESWLHSAQSLQQRLSQNLNHRDVSAIRVMRQLAQQQNVPAVPMPVVFTSALGFEQDNFLARRNLLKPVWGISQTPQVWLDHQIYESEGELRFNWDFVAALFPAGQVERQFEQYCALLNRMAEDESGWQLPLAALVPPVKHAGQCAERSPRVCPEQSQPHIAADESTVSLICDAFREVVGESVTPAENFFEAGATSLNLVQLHVLLQRHEFSTLTLLDLFTHPSPAALADYLAGVATVEKTKRPRPVRRRQRRIQHLPLVAAQPGIWMAEKLSELPSAWSVAHYVELTGEVDSPLLARAVVAGLAQADTLRMRFTEDNGEVWQWVDDALTFELPEIIDLRTNIDPHGTAQALMQADLQQDLRVDSGKPLVFHQLIQVADNRWYWYQRYHHLLVDGFSFPAITRQIANIYCTWLRGEPTPASPFTPFADVVEEYQQYRESEAWQRDAAFWAEQRRQLPPPASLSPAPLPGRSASADILRLKLEFTDGEFRQLATQLSGVQRTDLALALAALWLGRLCNRMDYAAGFIFMRRLGSAALTATGPVLNVLPLGIHIGNPSFSELLTRVREVALGAYAHQHIPFEMLVEALQPERNLSHTPLFQVMFVLQNAPASQLELTGITANPIKVKSTTTKFDLTLIMQNTASGLVGVWEYNTDLFDASTIERMTGHFVTLLEGVIANPQQPISQLPILTTVEQQQLLVEWNNTQTDYPADKCIHQLFEEQVERTPDAVAVVFGNQQLSYREMREQVVALANLLRERGVKPGDSVAVALPRSVFLTLALHAIVEAGAAWLPLDTGYPDDRLKMMLEDARPSLLITTDDQLPRFSDVPNLTSLCYNAPLTPQGSAPLQLSQPHHTAYIIFTSGSTGRPKGVMVGQTAIVNRLLWMQNHYPLTGEDVVAQKTPCSFDVSVWEFFWPFIAGAKLVMAEPEAHRDPLAMQQFFAEYGVTTTHFVPSMLAAFVASLTPQTARQSCATLKQVFCSGEALPADLCREWQQLTGAPLHNLYGPTEAAVDVSWYPAFGEELAQVRGSSVPIGYPVWNTGLRILDAMMHPVPPGVAGDLYLTGIQLAQGYLGRPDLTASRFIADPFAPGERMYRTGDVARWLDNGAVEYLGRSDDQLKIRGQRIELGEIDRVMQALPDVEQAVASCAIAREDIPGNKHLVAYIVPQEEQTCTERSRSTLTVSFVRSFLKEKLPEYMVPSAIVILDALPLTPNGKLDRRALPAPDLHSQLETIIAAAFSSLLGCDVQDADADFFALGGHSLLAMKLAAQLSRQVARQVTPGQVMVASTVAKLATIIDAELDKYVAPRNPILPVEQPFVHSPEERYRPFALTDVQQAYLVGRQPGFALGGVGSHFFVEFEIADLDIHRLEKVWNRLIARHDMLRAVVRDGQQRVLEQTPPWVIPAHILHSPEEALQVRDRLAHQVLNPEVWPVFDLQVGFVDGMPARLWLCLDNLLLDGLSMQILLSELEHGYRYPQQLPPPLPITFRDYLQQPALRTPNPDSLAWWQTQLDDIPPAPALPLRCLPQDVETPRFARLYGAMDSARWRRLKQRAADAHLTPSAVLLSVWSTVLAAWSAQPDFTLNLTLFDRRPLHPQINQILGDFTSLMLLSWHPGESWLQSARLLQQRLSESLNHRDVSAIRVMRQLARRQNVPAVPMPVVFTSALGFEQDNFLARRNLLKPVWGISQTPQVWLDHQVYESEGELRFNWDFVAALFPDGQVERQFAQYCALLNRMAEDDSSWQLPLADLVPPLKVTERRARRLRPERAQPRIAADKSSVSLICDTFREVVGEPVAPAENFFEAGATSLNLVQLHVLLQRHEFATLTLLDLFTHPSPVALANYLAGVALEEKTKRVRPVRRRQRRIQHLPLVAAQPGIWMAEKLSELPSAWSVAHYVELTGEVDSPLLARAVVAGLAQADTLRMRFTEDNGEVWQWVDDALTFELPEIIDLRTNIDPHGTAQALMQADLQQDLRVDSGKPLVFHQLIQVADNRWYWYQRYHHLLVDGFSFPAITRQIANIYCTWLRGEPTPASPFTPFADVVEEYQQYRESEAWQRDAAFWAEQRRQLPPPASLSPAPLPGRSASADILRLKLEFTDGEFRQLATQLSGVQRTDLALALAALWLGRLCNRMDYAAGFIFMRRLGSAALTATGPVLNVLPLGIHIGNPSFSELLTRVREVALGAYAHQHIPFEMLVEALQPERNLSHTPLFQVMFVLQNAPASQLELTGITANPIKVKSTTTKFDLTLIMQNTASGLVGVWEYNTDLFDASTIERMTGHFVTLLEGVIANPQQPISQLPILTTVEQQQLLVEWNNTQTDYPADKCIHQLFEEQVERTPDAVAVVFGNQQLSYREMREQVVALANLLRERGVKPGDSVAVALPRSVFLTLALHAIVEAGAAWLPLDTGYPDDRLKMMLEDARPSLLITTDDQLPRFSDVPNLTSLCYNAPLTPQGSAPLQLSQPHHTAYIIFTSGSTGRPKGVMVGQTAIVNRLLWMQNHYPLTGEDVVAQKTPCSFDVSVWEFFWPFIAGAKLVMAEPEAHRDPLAMQQFFAEYGVTTTHFVPSMLAAFVASLTPQTARQSCATLKQVFCSGEALPADLCREWQQLTGAPLHNLYGPTEAAVDVSWYPAFGEELAQVRGSSVPIGYPVWNTGLRILDAMMHPVPPGVAGDLYLTGIQLAQGYLGRPDLTASRFIADPFAPGERMYRTGDVARWLDNGAVEYLGRSDDQLKIRGQRIELGEIDRVMQALPDVEQAVASCAIAREDIPGNKHLVAYIVPQEEQTCTERSRSTLTVSFVRSFLKEKLPEYMVPSAIVILDALPLTPNGKLDRRALPAPDLHSQLETIIAAAFSSLLGCDVQDADADFFALGGHSLLAMKLAAQLSRQVARQVTPGQVMVASTVAKLATIIDAELDKYVAPRNPITSGEDNPIPLCQGDGEEMSTWLRRFGPPVEHRARLVCFPHAGAAADSYLDLARALAPEIDVHAVQYPGRQDRRDEEPLGTAGEIADEVAAVLRASGGDGPFALFGHSMGALIAYETARRLEREPGGGPLRLFVSGQTAPRVHERRTDLPGDDGLVDELRRLGTSEAALADEALLAMSLPVLRADYRVLRSYAWADGPPLRAGITALCGDADPLTATGDAERWLQHSVIPGRTRTFPGGHFYLGEQVTEVAGAVRRDLLRAGLAG

SEQ ID NO: 49 - protein, 3986 aa, Artificial Sequence
  MCC
MNPPCGPVRANCVHISIDFPMPVSKVSGPRSRTTSRRTPVRIGAVVVASSTSELLDGLAAVADGRPHASVVRGVARPSAPVVFVFPGQGAQWAGMAGELLGESRVFAAAMDACARAFEPVTDWTLAQVLDSPEQSRRVEVVQPALFAVQTSLAALWRSFGVTPDAVVGHSIGELAAAHVCGAAGAADAARAAALWSREMIPLVGNGDMAAVALSADEIEPRIARWDDDVVLAGVNGPRSVLLTGSPEPVARRVQELSAEGVRAQVINVSMAAHSAQVDDIAEGMRSALAWFAPGGSEVPFYASLTGGAVDTRELVADYWRRSFRLPVRFDEAIRSALEVGPGTFVEASPHPVLAAALQQTLDAEGSSAAVVPTLQRGQGGMRRFLLAAAQAFTGGVAVDWTAAYDDVGPNPALCRSSRRPRRKTSRPSPASTGTRHRTCCERLLAVVNGETAALAGREADAEATFRELGLDSVLAAQLRAKVSAAIGREVNIALLYDHPTPRALAEALAVPVEQPFVHSPEDRYQPFALTDVQQAYLVGRQPGFALGGVGSHFFVEFEIADLDLTRLETVWNRLIARHDMLRAIVRDGQQQVLEQTPPWVIPAHTLHTPEEALRVREKLAHQVLNPEVWPVFDLQVGYVDGMPARLWLCLDNLLLDGLSMQILLAELEHGYRYPQQLLPPLPVTFRDYLQQPSLQSPNPDSLAWWQAQLDDIPPAPALPLRCLPQEVETPRFARLNGALDSTRWHRLKKRAADAHLTPSAVLLSVWSTVLSAWSAQPEFTLNLTLFDRRPLHPQINQILGDFTSLMLLSWHPGESWLHSAQSLQQRLSQNLNHRDVSAIRVMRQLAQQQNVPAVPMPVVFTSALGFEQDNFLARRNLLKPVWGISQTPQVWLDHQIYESEGELRFNWDFVAALFPAGQVERQFEQYCALLNRMAEDESGWQLPLAALVPPVKHAGQCAERSPRVCPEQSQPHIAADESTVSLICDAFREVVGESVTPAENFFEAGATSLNLVQLHVLLQRHEFSTLTLLDLFTHPSPAALADYLAGVATVEKTKRPRPVRRRQRRIGEPFPLAPMQHAMWVGRHDHQQLGGVAGHLYVEFDGARVDPDRLRAAATRLALRHPMLRVQFLPDGTQRIPPAAGSRDFPISVADLRHVAPDVVDQRLAGIRDAKSHQQLDGAVFELALTLLPGERTRLHVDLDMQAADAMSYRILLADLAALYDGREPPALGYTYREYRQAIEAEETLPQPVRDADRDWWAQRIPQLPDPPALPTRAGGERDRRRSTRRWHWLDPQTRDALFARARARGITPAMTLAAAFANVLARWSASSRFLLNLPLFSRQALHPDVDLLVGDFTSSLLLDVDLGDTVSNLARKNQLTFTEDWEHRHWSGVELLRELKRQQRYPHGAPVVFTSNLGRSLYSSRAESPLGEPEWGISQTPQVWIDHLAFEHHGEVWLQWDSNDALFPPALVETLFDAYCQLINQLCDDESAWQKPFADMMPASQRAIRERVNATGAPIPEGLLHEGIFRIALQQPQALAVTDMRYQWNSYREMREQVVALANLLRERGVKPGDSVAVALPRSVFLTLALHAIVEAGAAWLPLDTGYPDDRLKMMLEDARPSLLITTDDQLPRFSDVPNLTSLCYNAPLTPQGSAPLQLSQPHHTAYIIFTSGSTGRPKGVMVGQTAIVNRLLWMQNHYPLTGEDVVAQKTPCSFDVSVWEFFWPFIAGAKLVMAEPEAHRDPLAMQQFFAEYGVTTTHFVPSMLAAFVASLTPQTARQSCATLKQVFCSGEALPADLCREWQQLTGAPLHNLYGPTEAAVDVSWYPAFGEELAQVRGSSVPIGYPVWNTGLRILDAMMHPVPPGVAGDLYLTGIQLAQGYLGRPDLTASRFIADPFAPGERMYRTGDVARWLDNGAVEYLGRSDDQLKIRGQRIELGEIDRVMQALPDVEQAVASCAIAREDIPGNKHLVAYIVPQEEQTCTERSRSTLTVSFVRSFLKEKLPEYMVPSAIVILDALPLTPNGKLDRRALPAPDLHSQLLDKYVAPRNPIETIIAAAFSSLLGCDVQDADADFFALGGHSLLAMKLAAQLSRQVARQVTPGQVMVASTVAKLATIIDAELPVEQPFVHSPEERYRPFALTDVQQAYLVGRQPGFALGGVGSHFFVEFEIADLDIHRLEKVWNRLIARHDMLRAVVRDGQQRVLEQTPPWVIPAHILHSPEEALQVRDRLAHQVLNPEVWPVFDLQVGFVDGMPARLWLCLDNLLLDGLSMQILLSELEHGYRYPQQLPPPLPITFRDYLQQPALRTPNPDSLAWWQTQLDDIPPAPALPLRCLPQDVETPRFARLYGAMDSARWRRLKQRAADAHLTPSAVLLSVWSTVLAAWSAQPDFTLNLTLFDRRPLHPQINQILGDFTSLMLLSWHPGESWLQSARLLQQRLSESLNHRDVSAIRVMRQLARRQNVPAVPMPVVFTSALGFEQDNFLARRNLLKPVWGISQTPQVWLDHQVYESEGELRFNWDFVAALFPDGQVERQFAQYCALLNRMAEDDSSWQLPLADLVPPLKVTERRARRLRPERAQPRIAADKSSVSLICDTFREVVGEPVAPAENFFEAGATSLNLVQLHVLLQRHEFATLTLLDLFTHPSPVALANYLAGVALEEKTKRVRPVRRRQRRIGEPFPLAPMQHAMWVGRHDHQQLGGVAGHLYVEFDGARVDPDRLRAAATRLALRHPMLRVQFLPDGTQRIPPAAGSRDFPISVADLRHVAPDVVDQRLAGIRDAKSHQQLDGAVFELALTLLPGERTRLHVDLDMQAADAMSYRILLADLAALYDGREPPALGYTYREYRQAIEAEETLPQPVRDADRDWWAQRIPQLPDPPALPTRAGGERDRRRSTRRWHWLDPQTRDALFARARARGITPAMTLAAAFANVLARWSASSRFLLNLPLFSRQALHPDVDLLVGDFTSSLLLDVDLGDTVSNLARKNQLTFTEDWEHRHWSGVELLRELKRQQRYPHGAPVVFTSNLGRSLYSSRAESPLGEPEWGISQTPQVWIDHLAFEHHGEVWLQWDSNDALFPPALVETLFDAYCQLINQLCDDESAWQKPFADMMPASQRAIRERVNATGAPIPEGLLHEGIFRIALQQPQALAVTDMRYQWNSYREMREQVVALANLLRERGVKPGDSVAVALPRSVFLTLALHAIVEAGAAWLPLDTGYPDDRLKMMLEDARPSLLITTDDQLPRFSDVPNLTSLCYNAPLTPQGSAPLQLSQPHHTAYIIFTSGSTGRPKGVMVGQTAIVNRLLWMQNHYPLTGEDVVAQKTPCSFDVSVWEFFWPFIAGAKLVMAEPEAHRDPLAMQQFFAEYGVTTTHFVPSMLAAFVASLTPQTARQSCATLKQVFCSGEALPADLCREWQQLTGAPLHNLYGPTEAAVDVSWYPAFGEELAQVRGSSVPIGYPVWNTGLRILDAMMHPVPPGVAGDLYLTGIQLAQGYLGRPDLTASRFIADPFAPGERMYRTGDVARWLDNGAVEYLGRSDDQLKIRGQRIELGEIDRVMQALPDVEQAVASCAIAREDIPGNKHLVAYIVPQEEQTCTERSRSTLTVSFVRSFLKEKLPEYMVPSAIVILDALPLTPNGKLDRRALPAPDLHSQLLDKYVAPRNPIETIIAAAFSSLLGCDVQDADADFFALGGHSLLAMKLAAQLSRQVARQVTPGQVMVASTVAKLATIIDAETSGEDNPIPLCQGDGEEMSTWLRRFGPPVEHRARLVCFPHAGAAADSYLDLARALAPEIDVHAVQYPGRQDRRDEEPLGTAGEIADEVAAVLRASGGDGPFALFGHSMGALIAYETARRLEREPGGGPLRLFVSGQTAPRVHERRTDLPGDDGLVDELRRLGTSEAALADEALLAMSLPVLRADYRVLRSYAWADGPPLRAGITALCGDADPLTATGDAERWLQHSVIPGRTRTFPGGHFYLGEQVTEVAGAVRRDLLRAGLAG

SEQ ID NO: 50 - protein, 4427 aa, Artificial Sequence
  MCH
MNPPCGPVRANCVHISIDFPMPVSKVSGPRSRTTSRRTPVRIGAVVVASSTSELLDGLAAVADGRPHASVVRGVARPSAPVVFVFPGQGAQWAGMAGELLGESRVFAAAMDACARAFEPVTDWTLAQVLDSPEQSRRVEVVQPALFAVQTSLAALWRSFGVTPDAVVGHSIGELAAAHVCGAAGAADAARAAALWSREMIPLVGNGDMAAVALSADEIEPRIARWDDDVVLAGVNGPRSVLLTGSPEPVARRVQELSAEGVRAQVINVSMAAHSAQVDDIAEGMRSALAWFAPGGSEVPFYASLTGGAVDTRELVADYWRRSFRLPVRFDEAIRSALEVGPGTFVEASPHPVLAAALQQTLDAEGSSAAVVPTLQRGQGGMRRFLLAAAQAFTGGVAVDWTAAYDDVGPNPALCRSSRRPRRKTSRPSPASTGTRHRTCCERLLAVVNGETAALAGREADAEATFRELGLDSVLAAQLRAKVSAAIGREVNIALLYDHPTPRALAEALAVPVEQPFVHSPEDRYQPFALTDVQQAYLVGRQPGFALGGVGSHFFVEFEIADLDLTRLETVWNRLIARHDMLRAIVRDGQQQVLEQTPPWVIPAHTLHTPEEALRVREKLAHQVLNPEVWPVFDLQVGYVDGMPARLWLCLDNLLLDGLSMQILLAELEHGYRYPQQLLPPLPVTFRDYLQQPSLQSPNPDSLAWWQAQLDDIPPAPALPLRCLPQEVETPRFARLNGALDSTRWHRLKKRAADAHLTPSAVLLSVWSTVLSAWSAQPEFTLNLTLFDRRPLHPQINQILGDFTSLMLLSWHPGESWLHSAQSLQQRLSQNLNHRDVSAIRVMRQLAQQQNVPAVPMPVVFTSALGFEQDNFLARRNLLKPVWGISQTPQVWLDHQIYESEGELRFNWDFVAALFPAGQVERQFEQYCALLNRMAEDESGWQLPLAALVPPVKHAGQCAERSPRVCPEQSQPHIAADESTVSLICDAFREVVGESVTPAENFFEAGATSLNLVQLHVLLQRHEFSTLTLLDLFTHPSPAALADYLAGVATVEKTKRPRPVRRRQRRIGEPFPLAPMQHAMWVGRHDHQQLGGVAGHLYVEFDGARVDPDRLRAAATRLALRHPMLRVQFLPDGTQRIPPAAGSRDFPISVADLRHVAPDVVDQRLAGIRDAKSHQQLDGAVFELALTLLPGERTRLHVDLDMQAADAMSYRILLADLAALYDGREPPALGYTYREYRQAIEAEETLPQPVRDADRDWWAQRIPQLPDPPALPTRAGGERDRRRSTRRWHWLDPQTRDALFARARARGITPAMTLAAAFANVLARWSASSRFLLNLPLFSRQALHPDVDLLVGDFTSSLLLDVDLGDTVSNLARKNQLTFTEDWEHRHWSGVELLRELKRQQRYPHGAPVVFTSNLGRSLYSSRAESPLGEPEWGISQTPQVWIDHLAFEHHGEVWLQWDSNDALFPPALVETLFDAYCQLINQLCDDESAWQKPFADMMPASQRAIRERVNATGAPIPEGLLHEGIFRIALQQPQALAVTDMRYQWNSYREMREQVVALANLLRERGVKPGDSVAVALPRSVFLTLALHAIVEAGAAWLPLDTGYPDDRLKMMLEDARPSLLITTDDQLPRFSDVPNLTSLCYNAPLTPQGSAPLQLSQPHHTAYIIFTSGSTGRPKGVMVGQTAIVNRLLWMQNHYPLTGEDVVAQKTPCSFDVSVWEFFWPFIAGAKLVMAEPEAHRDPLAMQQFFAEYGVTTTHFVPSMLAAFVASLTPQTARQSCATLKQVFCSGEALPADLCREWQQLTGAPLHNLYGPTEAAVDVSWYPAFGEELAQVRGSSVPIGYPVWNTGLRILDAMMHPVPPGVAGDLYLTGIQLAQGYLGRPDLTASRFIADPFAPGERMYRTGDVARWLDNGAVEYLGRSDDQLKIRGQRIELGEIDRVMQALPDVEQAVASCAIAREDIPGNKHLVAYIVPQEEQTCTERSRSTLTVSFVRSFLKEKLPEYMVPSAIVILDALPLTPNGKLDRRALPAPDLHSQLLDKYVAPRNPIETIIAAAFSSLLGCDVQDADADFFALGGHSLLAMKLAAQLSRQVARQVTPGQVMVASTVAKLATIIDAEPGIGALVPAPVVIAAGRTEEPIAIVSMACRLPGGVNTPQRLWELLREGGETLSGFPTDRGWDLARLHHPDPDNPGTSYVDKGGFLDDAAGFDAEFFGVSPREAAAMDPQQRLLLETSWELVENAGIDPHSLRGTATGVFLGVAKFGYGEDTAAAEDVEGYSVTGVAPAVASGRISYTMGLEGPSISVDTACSSSLVALHLAVESLRKGESSMAVVGGAAVMATPGVFVDFSRQRALAADGRSKAFGAGADGFGFSEGVTLVLLERLSEARRNGHEVLAVVRGSALNQDGASNGLSAPSGPAQRRVIRQALESCGLEPGDVDAVEAHGTGTALGDPIEANALLDTYGRDRDADRPLWLGSVKSNIGHTQAAAGVTGLLKVVLALRNGELPATLHVEEPTPHVDWSSGGVALLAGNQPWRRGERTRRAAVSAFGISGTNAHVIVEEAPQEVRPAPGQGLSPAVSTLVVAGKTMQRVSATAGMLADWMEGPGADVALADVAHTLNHHRSRQPKFGTVVARDRTQAIAGLRALAAGQHAPGVVNPAEGSPGPGTVFVFPGQGSQRAGMGEELAAAFPVFARIHQQVWDLLDVPDLDVNETGYAQPALFALQVALFGLLESWGVRPDAVVGHSVGELAAGYVSGLWSLEDACTLVSARARLMQALPAGGVMAAVPVSEDEARAVLGEGVEIAAVNGPSSVVLSGDEAAVLQAAEGLGKWTRLPTSHAFHSARMEPMLEEFRAVAEGLTYRTPQVAMAAGDQVMTAEYWVRQVRDTVRFGEQVASFEDAVFVELGADRSLARLVDGIAMLHGDHEAQAGMRREQPLPLGLRRLLTDLHNAGAAVDFSVLCPQGRLVDAPLPAWSHRFLFYDREGVDNRSPGGSTVAVHPLLLAAVDVPGHGGAVFTGRLSTDEQPWLAEHVVGGRTLVPGSVLVDLALAAGEDVGLPVLEELVLQRPLVLAGAGALLRMSVGAPDESGRRTIDVHAAEDVADLADAQWSQHATGTLAQGVAAGPRDTEQWPPEDAVRIPLDDHYDGLAEQGYEYGPSFQALVAYVAEDATATMLAEVALPGSIRSQQGLYAIHPALLDACFQSVGAHPDSQSVGSGLLVPLGVRRVRAYAPVRTARYCYTRVTKVELAGVEADIDVLDAHGTVLLAVCGLRIGTGVSERDKHNRVLNERLLTIEWHQRELPEMDPSGAGKWLLISDCAASDVTATRLADAFREHSAACTTMRWPLHDDQLAAADQLRDQVGSDEFSGVVVLTGPNTGTPHQGSADRGAEYVRRLVGIARELSDLPGAVPRMYVVTRGAQRVLADDCVNLEQGGLRGLLRTIGAEHPHLRATQIDVDEQTGVEQLARQLLATSEEDETAWRDNEWYVARLCPTPLRPQERRTIVADHQQSGMRLQIRTPGAIDSVAFEPAPDVEQPLRAGEVRVDVRATGVNFRDVLLALGMYPQKADMGTEAAGVVTAVGPDVDAFAPGDRVLGLFQGAFAPIAVTDHRLLARVPDGWSDADAAAVPIAYTTAHYALHDLAGLRAGQSVLIHAAAGGVGMAAVALARRAGAEVLATAGPAKHGTLRALGLDDEHIASSRETGFARKFRERTGGRGVDVVLNSLTGELLDESADLLAEDGVFVEMGKTDLRDAGDFRGRYAPFDLGEAGDDRLGEILREVVGLLGAGELDRLPVSAWELGIPQTGKSLVTLPPEQAQVFRPDGTVLITGGTGTLGRLLARHLVTEHGVRHLLLVSRRGADAPGSDELRAEIEDLGASAEIAACDTADRDALSALLDGLPRPLTGVVHAAGVLADGLVTSIDEPAVEQVLRAKVDAAWNLHELTANTGLSFFVLFSSAASVLAGPGQGVYAAANESLNALAALRRTRGLPAKALGWGLWAIGRAIAFAEQTGDAIAPEEGAYAFETLLRHNRAYSGYAPVIGSPWLTAFAQHSPFAEKFQSLGQNRSGTSKFLAELVDLPREEWPDRLRRLLELVRSHAAAVSGYGSADQLPERKAFKDLGFDSLAAVELRNRLGTATGVRLPSTLVFDHPTPLAVAEHLRDRLTSGEDNPIPLCQGDGEEMSTWLRRFGPPVEHRARLVCFPHAGAAADSYLDLARALAPEIDVHAVQYPGRQDRRDEEPLGTAGEIADEVAAVLRASGGDGPFALFGHSMGALIAYETARRLEREPGGGPLRLFVSGQTAPRVHERRTDLPGDDGLVDELRRLGTSEAALADEALLAMSLPVLRADYRVLRSYAWADGPPLRAGITALCGDADPLTATGDAERWLQHSVIPGRTRTFPGGHFYLGEQVTEVAGAVRRDLLRAGLAG

SEQ ID NO: 51 - protein, 3876 aa, Artificial Sequence
  MCO
MNPPCGPVRANCVHISIDFPMPVSKVSGPRSRTTSRRTPVRIGAVVVASSTSELLDGLAAVADGRPHASVVRGVARPSAPVVFVFPGQGAQWAGMAGELLGESRVFAAAMDACARAFEPVTDWTLAQVLDSPEQSRRVEVVQPALFAVQTSLAALWRSFGVTPDAVVGHSIGELAAAHVCGAAGAADAARAAALWSREMIPLVGNGDMAAVALSADEIEPRIARWDDDVVLAGVNGPRSVLLTGSPEPVARRVQELSAEGVRAQVINVSMAAHSAQVDDIAEGMRSALAWFAPGGSEVPFYASLTGGAVDTRELVADYWRRSFRLPVRFDEAIRSALEVGPGTFVEASPHPVLAAALQQTLDAEGSSAAVVPTLQRGQGGMRRFLLAAAQAFTGGVAVDWTAAYDDVGPNPALCRSSRRPRRKTSRPSPASTGTRHRTCCERLLAVVNGETAALAGREADAEATFRELGLDSVLAAQLRAKVSAAIGREVNIALLYDHPTPRALAEALAVPVEQPFVHSPEDRYQPFALTDVQQAYLVGRQPGFALGGVGSHFFVEFEIADLDLTRLETVWNRLIARHDMLRAIVRDGQQQVLEQTPPWVIPAHTLHTPEEALRVREKLAHQVLNPEVWPVFDLQVGYVDGMPARLWLCLDNLLLDGLSMQILLAELEHGYRYPQQLLPPLPVTFRDYLQQPSLQSPNPDSLAWWQAQLDDIPPAPALPLRCLPQEVETPRFARLNGALDSTRWHRLKKRAADAHLTPSAVLLSVWSTVLSAWSAQPEFTLNLTLFDRRPLHPQINQILGDFTSLMLLSWHPGESWLHSAQSLQQRLSQNLNHRDVSAIRVMRQLAQQQNVPAVPMPVVFTSALGFEQDNFLARRNLLKPVWGISQTPQVWLDHQIYESEGELRFNWDFVAALFPAGQVERQFEQYCALLNRMAEDESGWQLPLAALVPPVKHAGQCAERSPRVCPEQSQPHIAADESTVSLICDAFREVVGESVTPAENFFEAGATSLNLVQLHVLLQRHEFSTLTLLDLFTHPSPAALADYLAGVATVEKTKRPRPVRRRQRRIGEPFPLAPMQHAMWVGRHDHQQLGGVAGHLYVEFDGARVDPDRLRAAATRLALRHPMLRVQFLPDGTQRIPPAAGSRDFPISVADLRHVAPDVVDQRLAGIRDAKSHQQLDGAVFELALTLLPGERTRLHVDLDMQAADAMSYRILLADLAALYDGREPPALGYTYREYRQAIEAEETLPQPVRDADRDWWAQRIPQLPDPPALPTRAGGERDRRRSTRRWHWLDPQTRDALFARARARGITPAMTLAAAFANVLARWSASSRFLLNLPLFSRQALHPDVDLLVGDFTSSLLLDVDLGDTVSNLARKNQLTFTEDWEHRHWSGVELLRELKRQQRYPHGAPVVFTSNLGRSLYSSRAESPLGEPEWGISQTPQVWIDHLAFEHHGEVWLQWDSNDALFPPALVETLFDAYCQLINQLCDDESAWQKPFADMMPASQRAIRERVNATGAPIPEGLLHEGIFRIALQQPQALAVTDMRYQWNSYREMREQVVALANLLRERGVKPGDSVAVALPRSVFLTLALHAIVEAGAAWLPLDTGYPDDRLKMMLEDARPSLLITTDDQLPRFSDVPNLTSLCYNAPLTPQGSAPLQLSQPHHTAYIIFTSGSTGRPKGVMVGQTAIVNRLLWMQNHYPLTGEDVVAQKTPCSFDVSVWEFFWPFIAGAKLVMAEPEAHRDPLAMQQFFAEYGVTTTHFVPSMLAAFVASLTPQTARQSCATLKQVFCSGEALPADLCREWQQLTGAPLHNLYGPTEAAVDVSWYPAFGEELAQVRGSSVPIGYPVWNTGLRILDAMMHPVPPGVAGDLYLTGIQLAQGYLGRPDLTASRFIADPFAPGERMYRTGDVARWLDNGAVEYLGRSDDQLKIRGQRIELGEIDRVMQALPDVEQAVASCAIAREDIPGNKHLVAYIVPQEEQTCTERSRSTLTVSFVRSFLKEKLPEYMVPSAIVILDALPLTPNGKLDRRALPAPDLHSQLLDKYVAPRNPIETIIAAAFSSLLGCDVQDADADFFALGGHSLLAMKLAAQLSRQVARQVTPGQVMVASTVAKLATIIDAEPGIGALVPAPVVIAAGRTEEPIAIVSMACRLPGGVNTPQRLWELLREGGETLSGFPTDRGWDLARLHHPDPDNPGTSYVDKGGFLDDAAGFDAEFFGVSPREAAAMDPQQRLLLETSWELVENAGIDPHSLRGTATGVFLGVAKFGYGEDTAAAEDVEGYSVTGVAPAVASGRISYTMGLEGPSISVDTACSSSLVALHLAVESLRKGESSMAVVGGAAVMATPGVFVDFSRQRALAADGRSKAFGAGADGFGFSEGVTLVLLERLSEARRNGHEVLAVVRGSALNQDGASNGLSAPSGPAQRRVIRQALESCGLEPGDVDAVEAHGTGTALGDPIEANALLDTYGRDRDADRPLWLGSVKSNIGHTQAAAGVTGLLKVVLALRNGELPATLHVEEPTPHVDWSSGGVALLAGNQPWRRGERTRRAAVSAFGISGTNAHVIVEEAPQEVRPAPGQGLSPAVSTLVVAGKTMQRVSATAGMLADWMEGPGADVALADVAHTLNHHRSRQPKFGTVVARDRTQAIAGLRALAAGQHAPGVVNPAEGSPGPGTVFVFPGQGSQRAGMGEELAAAFPVFARIHQQVWDLLDVPDLDVNETGYAQPALFALQVALFGLLESWGVRPDAVVGHSVGELAAGYVSGLWSLEDACTLVSARARLMQALPAGGVMAAVPVSEDEARAVLGEGVEIAAVNGPSSVVLSGDEAAVLQAAEGLGKWTRLPTSHAFHSARMEPMLEEFRAVAEGLTYRTPQVAMAAGDQVMTAEYWVRQVRDTVRFGEQVASFEDAVFVELGADRSLARLVDGIAMLHGDHEAQAADHRQITEAVADAYVLGHLPDFAALRRPHARKLDLPTYPFERRQYWFRDARERPEQPRDTGGPRTEAVRLLEDGRIEELAALLGGASDDQHTLQVLTKLAAQHNQQRTTRSIADDRYEIRWDRSTSPLSGADVDQAGSWIVVSDDADAVPPLVDLLAARNEPHQVVGLPASDADEERLAETLRAAATEDATLRIVHVAALEAGATPSMRSLLRMQHRILGGTRRVFRAAVAAELRGPIWIVTRGAQRVADTDTVAPHQSCLWGFGRAASLELPHVWGGLADLSEGGDNAADEWSALVDRIAAPHGSAVREDQLALRDRAVYTPRLARRSAPPSGTPLHLRGDGTVLITGGTGTLGRLLARHLVTEHGVRHLLLVSRRGADAPGSDELRAEIEDLGASAEIAACDTADRDALSALLDGLPRPLTGVVHAAGVLADGLVTSIDEPAVEQVLRAKVDAAWNLHELTANTGLSFFVLFSSAASVLAGPGQGVYAAANESLNALAALRRTRGLPAKALGWGLWAIGRAIAFAEQTGDAIAPEEGAYAFETLLRHNRAYSGYAPVIGSPWLTAFAQHSPFAEKFQSLGQNRSGTSKFLAELVDLPREEWPDRLRRLLELVRSHAAAVSGYGSADQLPERKAFKDLGFDSLAAVELRNRLGTATGVRLPSTLVFDHPTPLAVAEHLRDRLTSGEDNPIPLCQGDGEEMSTWLRRFGPPVEHRARLVCFPHAGAAADSYLDLARALAPEIDVHAVQYPGRQDRRDEEPLGTAGEIADEVAAVLRASGGDGPFALFGHSMGALIAYETARRLEREPGGGPLRLFVSGQTAPRVHERRTDLPGDDGLVDELRRLGTSEAALADEALLAMSLPVLRADYRVLRSYAWADGPPLRAGITALCGDADPLTATGDAERWLQHSVIPGRTRTFPGGHFYLGEQVTEVAGAVRRDLLRAGLAG

SEQ ID NO: 52 - protein, 3989 aa, Artificial Sequence
  MCS
MNPPCGPVRANCVHISIDFPMPVSKVSGPRSRTTSRRTPVRIGAVVVASSTSELLDGLAAVADGRPHASVVRGVARPSAPVVFVFPGQGAQWAGMAGELLGESRVFAAAMDACARAFEPVTDWTLAQVLDSPEQSRRVEVVQPALFAVQTSLAALWRSFGVTPDAVVGHSIGELAAAHVCGAAGAADAARAAALWSREMIPLVGNGDMAAVALSADEIEPRIARWDDDVVLAGVNGPRSVLLTGSPEPVARRVQELSAEGVRAQVINVSMAAHSAQVDDIAEGMRSALAWFAPGGSEVPFYASLTGGAVDTRELVADYWRRSFRLPVRFDEAIRSALEVGPGTFVEASPHPVLAAALQQTLDAEGSSAAVVPTLQRGQGGMRRFLLAAAQAFTGGVAVDWTAAYDDVGPNPALCRSSRRPRRKTSRPSPASTGTRHRTCCERLLAVVNGETAALAGREADAEATFRELGLDSVLAAQLRAKVSAAIGREVNIALLYDHPTPRALAEALAVPVEQPFVHSPEDRYQPFALTDVQQAYLVGRQPGFALGGVGSHFFVEFEIADLDLTRLETVWNRLIARHDMLRAIVRDGQQQVLEQTPPWVIPAHTLHTPEEALRVREKLAHQVLNPEVWPVFDLQVGYVDGMPARLWLCLDNLLLDGLSMQILLAELEHGYRYPQQLLPPLPVTFRDYLQQPSLQSPNPDSLAWWQAQLDDIPPAPALPLRCLPQEVETPRFARLNGALDSTRWHRLKKRAADAHLTPSAVLLSVWSTVLSAWSAQPEFTLNLTLFDRRPLHPQINQILGDFTSLMLLSWHPGESWLHSAQSLQQRLSQNLNHRDVSAIRVMRQLAQQQNVPAVPMPVVFTSALGFEQDNFLARRNLLKPVWGISQTPQVWLDHQIYESEGELRFNWDFVAALFPAGQVERQFEQYCALLNRMAEDESGWQLPLAALVPPVKHAGQCAERSPRVCPEQSQPHIAADESTVSLICDAFREVVGESVTPAENFFEAGATSLNLVQLHVLLQRHEFSTLTLLDLFTHPSPAALADYLAGVATVEKTKRPRPVRRRQRRIGEPFPLAPMQHAMWVGRHDHQQLGGVAGHLYVEFDGARVDPDRLRAAATRLALRHPMLRVQFLPDGTQRIPPAAGSRDFPISVADLRHVAPDVVDQRLAGIRDAKSHQQLDGAVFELALTLLPGERTRLHVDLDMQAADAMSYRILLADLAALYDGREPPALGYTYREYRQAIEAEETLPQPVRDADRDWWAQRIPQLPDPPALPTRAGGERDRRRSTRRWHWLDPQTRDALFARARARGITPAMTLAAAFANVLARWSASSRFLLNLPLFSRQALHPDVDLLVGDFTSSLLLDVDLGDTVSNLARKNQLTFTEDWEHRHWSGVELLRELKRQQRYPHGAPVVFTSNLGRSLYSSRAESPLGEPEWGISQTPQVWIDHLAFEHHGEVWLQWDSNDALFPPALVETLFDAYCQLINQLCDDESAWQKPFADMMPASQRAIRERVNATGAPIPEGLLHEGIFRIALQQPQALAVTDMRYQWNSYREMREQVVALANLLRERGVKPGDSVAVALPRSVFLTLALHAIVEAGAAWLPLDTGYPDDRLKMMLEDARPSLLITTDDQLPRFSDVPNLTSLCYNAPLTPQGSAPLQLSQPHHTAYIIFTSGSTGRPKGVMVGQTAIVNRLLWMQNHYPLTGEDVVAQKTPCSFDVSVWEFFWPFIAGAKLVMAEPEAHRDPLAMQQFFAEYGVTTTHFVPSMLAAFVASLTPQTARQSCATLKQVFCSGEALPADLCREWQQLTGAPLHNLYGPTEAAVDVSWYPAFGEELAQVRGSSVPIGYPVWNTGLRILDAMMHPVPPGVAGDLYLTGIQLAQGYLGRPDLTASRFIADPFAPGERMYRTGDVARWLDNGAVEYLGRSDDQLKIRGQRIELGEIDRVMQALPDVEQAVASCAIAREDIPGNKHLVAYIVPQEEQTCTERSRSTLTVSFVRSFLKEKLPEYMVPSAIVILDALPLTPNGKLDRRALPAPDLHSQLLDKYVAPRNPIETIIAAAFSSLLGCDVQDADADFFALGGHSLLAMKLAAQLSRQVARQVTPGQVMVASTVAKLATIIDAELPVEQPFVHSPEERYRPFALTDVQQAYLVGRQPGFALGGVGSHFFVEFEIADLDIHRLEKVWNRLIARHDMLRAVVRDGQQRVLEQTPPWVIPAHILHSPEEALQVRDRLAHQVLNPEVWPVFDLQVGFVDGMPARLWLCLDNLLLDGLSMQILLSELEHGYRYPQQLPPPLPITFRDYLQQPALRTPNPDSLAWWQTQLDDIPPAPALPLRCLPQDVETPRFARLYGAMDSARWRRLKQRAADAHLTPSAVLLSVWSTVLAAWSAQPDFTLNLTLFDRRPLHPQINQILGDFTSLMLLSWHPGESWLQSARLLQQRLSESLNHRDVSAIRVMRQLARRQNVPAVPMPVVFTSALGFEQDNFLARRNLLKPVWGISQTPQVWLDHQVYESEGELRFNWDFVAALFPDGQVERQFAQYCALLNRMAEDDSSWQLPLADLVPPLKVTERRARRLRPERAQPRIAADKSSVSLICDTFREVVGEPVAPAENFFEAGATSLNLVQLHVLLQRHEFATLTLLDLFTHPSPVALANYLAGVALEEKTKRVRPVRRRQRRIQHLPLVAAQPGIWMAEKLSELPSAWSVAHYVELTGEVDSPLLARAVVAGLAQADTLRMRFTEDNGEVWQWVDDALTFELPEIIDLRTNIDPHGTAQALMQADLQQDLRVDSGKPLVFHQLIQVADNRWYWYQRYHHLLVDGFSFPAITRQIANIYCTWLRGEPTPASPFTPFADVVEEYQQYRESEAWQRDAAFWAEQRRQLPPPASLSPAPLPGRSASADILRLKLEFTDGEFRQLATQLSGVQRTDLALALAALWLGRLCNRMDYAAGFIFMRRLGSAALTATGPVLNVLPLGIHIGNPSFSELLTRVREVALGAYAHQHIPFEMLVEALQPERNLSHTPLFQVMFVLQNAPASQLELTGITANPIKVKSTTTKFDLTLIMQNTASGLVGVWEYNTDLFDASTIERMTGHFVTLLEGVIANPQQPISQLPILTTVEQQQLLVEWNNTQTDYPADKCIHQLFEEQVERTPDAVAVVFGNQQLSYREMREQVVALANLLRERGVKPGDSVAVALPRSVFLTLALHAIVEAGAAWLPLDTGYPDDRLKMMLEDARPSLLITTDDQLPRFSDVPNLTSLCYNAPLTPQGSAPLQLSQPHHTAYIIFTSGSTGRPKGVMVGQTAIVNRLLWMQNHYPLTGEDVVAQKTPCSFDVSVWEFFWPFIAGAKLVMAEPEAHRDPLAMQQFFAEYGVTTTHFVPSMLAAFVASLTPQTARQSCATLKQVFCSGEALPADLCREWQQLTGAPLHNLYGPTEAAVDVSWYPAFGEELAQVRGSSVPIGYPVWNTGLRILDAMMHPVPPGVAGDLYLTGIQLAQGYLGRPDLTASRFIADPFAPGERMYRTGDVARWLDNGAVEYLGRSDDQLKIRGQRIELGEIDRVMQALPDVEQAVASCAIAREDIPGNKHLVAYIVPQEEQTCTERSRSTLTVSFVRSFLKEKLPEYMVPSAIVILDALPLTPNGKLDRRALPAPDLHSQLETIIAAAFSSLLGCDVQDADADFFALGGHSLLAMKLAAQLSRQVARQVTPGQVMVASTVAKLATIIDAELDKYVAPRNPITSGEDNPIPLCQGDGEEMSTWLRRFGPPVEHRARLVCFPHAGAAADSYLDLARALAPEIDVHAVQYPGRQDRRDEEPLGTAGEIADEVAAVLRASGGDGPFALFGHSMGALIAYETARRLEREPGGGPLRLFVSGQTAPRVHERRTDLPGDDGLVDELRRLGTSEAALADEALLAMSLPVLRADYRVLRSYAWADGPPLRAGITALCGDADPLTATGDAERWLQHSVIPGRTRTFPGGHFYLGEQVTEVAGAVRRDLLRAGLAG

SEQ ID NO: 53 - protein, 4422 aa, Artificial Sequence
  MHC
MNPPCGPVRANCVHISIDFPMPVSKVSGPRSRTTSRRTPVRIGAVVVASSTSELLDGLAAVADGRPHASVVRGVARPSAPVVFVFPGQGAQWAGMAGELLGESRVFAAAMDACARAFEPVTDWTLAQVLDSPEQSRRVEVVQPALFAVQTSLAALWRSFGVTPDAVVGHSIGELAAAHVCGAAGAADAARAAALWSREMIPLVGNGDMAAVALSADEIEPRIARWDDDVVLAGVNGPRSVLLTGSPEPVARRVQELSAEGVRAQVINVSMAAHSAQVDDIAEGMRSALAWFAPGGSEVPFYASLTGGAVDTRELVADYWRRSFRLPVRFDEAIRSALEVGPGTFVEASPHPVLAAALQQTLDAEGSSAAVVPTLQRGQGGMRRFLLAAAQAFTGGVAVDWTAAYDDVGPNPALCRSSRRPRRKTSRPSPASTGTRHRTCCERLLAVVNGETAALAGREADAEATFRELGLDSVLAAQLRAKVSAAIGREVNIALLYDHPTPRALAEALAGLPQEIKHTPAVRTTSEDPIAIVSMACRLPGGVNTPQRLWELLREGGETLSGFPTDRGWDLARLHHPDPDNPGTSYVDKGGFLDDAAGFDAEFFGVSPREAAAMDPQQRLLLETSWELVENAGIDPHSLRGTATGVFLGVAKFGYGEDTAAAEDVEGYSVTGVAPAVASGRISYTMGLEGPSISVDTACSSSLVALHLAVESLRKGESSMAVVGGAAVMATPGVFVDFSRQRALAADGRSKAFGAGADGFGFSEGVTLVLLERLSEARRNGHEVLAVVRGSALNQDGASNGLSAPSGPAQRRVIRQALESCGLEPGDVDAVEAHGTGTALGDPIEANALLDTYGRDRDADRPLWLGSVKSNIGHTQAAAGVTGLLKVVLALRNGELPATLHVEEPTPHVDWSSGGVALLAGNQPWRRGERTRRAAVSAFGISGTNAHVIVEEAPQEVRPAPGQGLSPAVSTLVVAGKTMQRVSATAGMLADWMEGPGADVALADVAHTLNHHRSRQPKFGTVVARDRTQAIAGLRALAAGQHAPGVVNPAEGSPGPGTVFVFPGQGSQRAGMGEELAAAFPVFARIHQQVWDLLDVPDLDVNETGYAQPALFALQVALFGLLESWGVRPDAVVGHSVGELAAGYVSGLWSLEDACTLVSARARLMQALPAGGVMAAVPVSEDEARAVLGEGVEIAAVNGPSSVVLSGDEAAVLQAAEGLGKWTRLPTSHAFHSARMEPMLEEFRAVAEGLTYRTPQVAMAAGDQVMTAEYWVRQVRDTVRFGEQVASFEDAVFVELGADRSLARLVDGIAMLHGDHEAQAGMRREQPLPLGLRRLLTDLHNAGAAVDFSVLCPQGRLVDAPLPAWSHRFLFYDREGVDNRSPGGSTVAVHPLLLAAVDVPGHGGAVFTGRLSTDEQPWLAEHVVGGRTLVPGSVLVDLALAAGEDVGLPVLEELVLQRPLVLAGAGALLRMSVGAPDESGRRTIDVHAAEDVADLADAQWSQHATGTLAQGVAAGPRDTEQWPPEDAVRIPLDDHYDGLAEQGYEYGPSFQALVAYVAEDATATMLAEVALPGSIRSQQGLYAIHPALLDACFQSVGAHPDSQSVGSGLLVPLGVRRVRAYAPVRTARYCYTRVTKVELAGVEADIDVLDAHGTVLLAVCGLRIGTGVSERDKHNRVLNERLLTIEWHQRELPEMDPSGAGKWLLISDCAASDVTATRLADAFREHSAACTTMRWPLHDDQLAAADQLRDQVGSDEFSGVVVLTGPNTGTPHQGSADRGAEYVRRLVGIARELSDLPGAVPRMYVVTRGAQRVLADDCVNLEQGGLRGLLRTIGAEHPHLRATQIDVDEQTGVEQLARQLLATSEEDETAWRDNEWYVARLCPTPLRPQERRTIVADHQQSGMRLQIRTPGAIDSVAFEPAPDVEQPLRAGEVRVDVRATGVNFRDVLLALGMYPQKADMGTEAAGVVTAVGPDVDAFAPGDRVLGLFQGAFAPIAVTDHRLLARVPDGWSDADAAAVPIAYTTAHYALHDLAGLRAGQSVLIHAAAGGVGMAAVALARRAGAEVLATAGPAKHGTLRALGLDDEHIASSRETGFARKFRERTGGRGVDVVLNSLTGELLDESADLLAEDGVFVEMGKTDLRDAGDFRGRYAPFDLGEAGDDRLGEILREVVGLLGAGELDRLPVSAWELGIPQTGKSLVTLPPEQAQVFRPDGTVLITGGTGTLGRLLARHLVTEHGVRHLLLVSRRGADAPGSDELRAEIEDLGASAEIAACDTADRDALSALLDGLPRPLTGVVHAAGVLADGLVTSIDEPAVEQVLRAKVDAAWNLHELTANTGLSFFVLFSSAASVLAGPGQGVYAAANESLNALAALRRTRGLPAKALGWGLWAIGRAIAFAEQTGDAIAPEEGAYAFETLLRHNRAYSGYAPVIGSPWLTAFAQHSPFAEKFQSLGQNRSGTSKFLAELVDLPREEWPDRLRRLLELVRSHAAAVSGYGSADQLPERKAFKDLGFDSLAAVELRNRLGTATGVRLPSTLVFDHPTPLAVAEHLRDRLLPVEQPFVHSPEERYRPFALTDVQQAYLVGRQPGFALGGVGSHFFVEFEIADLDIHRLEKVWNRLIARHDMLRAVVRDGQQRVLEQTPPWVIPAHILHSPEEALQVRDRLAHQVLNPEVWPVFDLQVGFVDGMPARLWLCLDNLLLDGLSMQILLSELEHGYRYPQQLPPPLPITFRDYLQQPALRTPNPDSLAWWQTQLDDIPPAPALPLRCLPQDVETPRFARLYGAMDSARWRRLKQRAADAHLTPSAVLLSVWSTVLAAWSAQPDFTLNLTLFDRRPLHPQINQILGDFTSLMLLSWHPGESWLQSARLLQQRLSESLNHRDVSAIRVMRQLARRQNVPAVPMPVVFTSALGFEQDNFLARRNLLKPVWGISQTPQVWLDHQVYESEGELRFNWDFVAALFPDGQVERQFAQYCALLNRMAEDDSSWQLPLADLVPPLKVTERRARRLRPERAQPRIAADKSSVSLICDTFREVVGEPVAPAENFFEAGATSLNLVQLHVLLQRHEFATLTLLDLFTHPSPVALANYLAGVALEEKTKRVRPVRRRQRRIGEPFPLAPMQHAMWVGRHDHQQLGGVAGHLYVEFDGARVDPDRLRAAATRLALRHPMLRVQFLPDGTQRIPPAAGSRDFPISVADLRHVAPDVVDQRLAGIRDAKSHQQLDGAVFELALTLLPGERTRLHVDLDMQAADAMSYRILLADLAALYDGREPPALGYTYREYRQAIEAEETLPQPVRDADRDWWAQRIPQLPDPPALPTRAGGERDRRRSTRRWHWLDPQTRDALFARARARGITPAMTLAAAFANVLARWSASSRFLLNLPLFSRQALHPDVDLLVGDFTSSLLLDVDLGDTVSNLARKNQLTFTEDWEHRHWSGVELLRELKRQQRYPHGAPVVFTSNLGRSLYSSRAESPLGEPEWGISQTPQVWIDHLAFEHHGEVWLQWDSNDALFPPALVETLFDAYCQLINQLCDDESAWQKPFADMMPASQRAIRERVNATGAPIPEGLLHEGIFRIALQQPQALAVTDMRYQWNSYREMREQVVALANLLRERGVKPGDSVAVALPRSVFLTLALHAIVEAGAAWLPLDTGYPDDRLKMMLEDARPSLLITTDDQLPRFSDVPNLTSLCYNAPLTPQGSAPLQLSQPHHTAYIIFTSGSTGRPKGVMVGQTAIVNRLLWMQNHYPLTGEDVVAQKTPCSFDVSVWEFFWPFIAGAKLVMAEPEAHRDPLAMQQFFAEYGVTTTHFVPSMLAAFVASLTPQTARQSCATLKQVFCSGEALPADLCREWQQLTGAPLHNLYGPTEAAVDVSWYPAFGEELAQVRGSSVPIGYPVWNTGLRILDAMMHPVPPGVAGDLYLTGIQLAQGYLGRPDLTASRFIADPFAPGERMYRTGDVARWLDNGAVEYLGRSDDQLKIRGQRIELGEIDRVMQALPDVEQAVASCAIAREDIPGNKHLVAYIVPQEEQTCTERSRSTLTVSFVRSFLKEKLPEYMVPSAIVILDALPLTPNGKLDRRALPAPDLHSQLLDKYVAPRNPIETIIAAAFSSLLGCDVQDADADFFALGGHSLLAMKLAAQLSRQVARQVTPGQVMVASTVAKLATIIDAETSGEDNPIPLCQGDGEEMSTWLRRFGPPVEHRARLVCFPHAGAAADSYLDLARALAPEIDVHAVQYPGRQDRRDEEPLGTAGEIADEVAAVLRASGGDGPFALFGHSMGALIAYETARRLEREPGGGPLRLFVSGQTAPRVHERRTDLPGDDGLVDELRRLGTSEAALADEALLAMSLPVLRADYRVLRSYAWADGPPLRAGITALCGDADPLTATGDAERWLQHSVIPGRTRTFPGGHFYLGEQVTEVAGAVRRDLLRAGLAG

SEQ ID NO: 54 - protein, 4863 aa, Artificial Sequence
  MHH
MNPPCGPVRANCVHISIDFPMPVSKVSGPRSRTTSRRTPVRIGAVVVASSTSELLDGLAAVADGRPHASVVRGVARPSAPVVFVFPGQGAQWAGMAGELLGESRVFAAAMDACARAFEPVTDWTLAQVLDSPEQSRRVEVVQPALFAVQTSLAALWRSFGVTPDAVVGHSIGELAAAHVCGAAGAADAARAAALWSREMIPLVGNGDMAAVALSADEIEPRIARWDDDVVLAGVNGPRSVLLTGSPEPVARRVQELSAEGVRAQVINVSMAAHSAQVDDIAEGMRSALAWFAPGGSEVPFYASLTGGAVDTRELVADYWRRSFRLPVRFDEAIRSALEVGPGTFVEASPHPVLAAALQQTLDAEGSSAAVVPTLQRGQGGMRRFLLAAAQAFTGGVAVDWTAAYDDVGPNPALCRSSRRPRRKTSRPSPASTGTRHRTCCERLLAVVNGETAALAGREADAEATFRELGLDSVLAAQLRAKVSAAIGREVNIALLYDHPTPRALAEALAGLPQEIKHTPAVRTTSEDPIAIVSMACRLPGGVNTPQRLWELLREGGETLSGFPTDRGWDLARLHHPDPDNPGTSYVDKGGFLDDAAGFDAEFFGVSPREAAAMDPQQRLLLETSWELVENAGIDPHSLRGTATGVFLGVAKFGYGEDTAAAEDVEGYSVTGVAPAVASGRISYTMGLEGPSISVDTACSSSLVALHLAVESLRKGESSMAVVGGAAVMATPGVFVDFSRQRALAADGRSKAFGAGADGFGFSEGVTLVLLERLSEARRNGHEVLAVVRGSALNQDGASNGLSAPSGPAQRRVIRQALESCGLEPGDVDAVEAHGTGTALGDPIEANALLDTYGRDRDADRPLWLGSVKSNIGHTQAAAGVTGLLKVVLALRNGELPATLHVEEPTPHVDWSSGGVALLAGNQPWRRGERTRRAAVSAFGISGTNAHVIVEEAPQEVRPAPGQGLSPAVSTLVVAGKTMQRVSATAGMLADWMEGPGADVALADVAHTLNHHRSRQPKFGTVVARDRTQAIAGLRALAAGQHAPGVVNPAEGSPGPGTVFVFPGQGSQRAGMGEELAAAFPVFARIHQQVWDLLDVPDLDVNETGYAQPALFALQVALFGLLESWGVRPDAVVGHSVGELAAGYVSGLWSLEDACTLVSARARLMQALPAGGVMAAVPVSEDEARAVLGEGVEIAAVNGPSSVVLSGDEAAVLQAAEGLGKWTRLPTSHAFHSARMEPMLEEFRAVAEGLTYRTPQVAMAAGDQVMTAEYWVRQVRDTVRFGEQVASFEDAVFVELGADRSLARLVDGIAMLHGDHEAQAGMRREQPLPLGLRRLLTDLHNAGAAVDFSVLCPQGRLVDAPLPAWSHRFLFYDREGVDNRSPGGSTVAVHPLLLAAVDVPGHGGAVFTGRLSTDEQPWLAEHVVGGRTLVPGSVLVDLALAAGEDVGLPVLEELVLQRPLVLAGAGALLRMSVGAPDESGRRTIDVHAAEDVADLADAQWSQHATGTLAQGVAAGPRDTEQWPPEDAVRIPLDDHYDGLAEQGYEYGPSFQALVAYVAEDATATMLAEVALPGSIRSQQGLYAIHPALLDACFQSVGAHPDSQSVGSGLLVPLGVRRVRAYAPVRTARYCYTRVTKVELAGVEADIDVLDAHGTVLLAVCGLRIGTGVSERDKHNRVLNERLLTIEWHQRELPEMDPSGAGKWLLISDCAASDVTATRLADAFREHSAACTTMRWPLHDDQLAAADQLRDQVGSDEFSGVVVLTGPNTGTPHQGSADRGAEYVRRLVGIARELSDLPGAVPRMYVVTRGAQRVLADDCVNLEQGGLRGLLRTIGAEHPHLRATQIDVDEQTGVEQLARQLLATSEEDETAWRDNEWYVARLCPTPLRPQERRTIVADHQQSGMRLQIRTPGAIDSVAFEPAPDVEQPLRAGEVRVDVRATGVNFRDVLLALGMYPQKADMGTEAAGVVTAVGPDVDAFAPGDRVLGLFQGAFAPIAVTDHRLLARVPDGWSDADAAAVPIAYTTAHYALHDLAGLRAGQSVLIHAAAGGVGMAAVALARRAGAEVLATAGPAKHGTLRALGLDDEHIASSRETGFARKFRERTGGRGVDVVLNSLTGELLDESADLLAEDGVFVEMGKTDLRDAGDFRGRYAPFDLGEAGDDRLGEILREVVGLLGAGELDRLPVSAWELGIPQTGKSLVTLPPEQAQVFRPDGTVLITGGTGTLGRLLARHLVTEHGVRHLLLVSRRGADAPGSDELRAEIEDLGASAEIAACDTADRDALSALLDGLPRPLTGVVHAAGVLADGLVTSIDEPAVEQVLRAKVDAAWNLHELTANTGLSFFVLFSSAASVLAGPGQGVYAAANESLNALAALRRTRGLPAKALGWGLWAIGRAIAFAEQTGDAIAPEEGAYAFETLLRHNRAYSGYAPVIGSPWLTAFAQHSPFAEKFQSLGQNRSGTSKFLAELVDLPREEWPDRLRRLLELVRSHAAAVSGYGSADQLPERKAFKDLGFDSLAAVELRNRLGTATGVRLPSTLVFDHPTPLAVAEHLRDRLPGIGALVPAPVVIAAGRTEEPIAIVSMACRLPGGVNTPQRLWELLREGGETLSGFPTDRGWDLARLHHPDPDNPGTSYVDKGGFLDDAAGFDAEFFGVSPREAAAMDPQQRLLLETSWELVENAGIDPHSLRGTATGVFLGVAKFGYGEDTAAAEDVEGYSVTGVAPAVASGRISYTMGLEGPSISVDTACSSSLVALHLAVESLRKGESSMAVVGGAAVMATPGVFVDFSRQRALAADGRSKAFGAGADGFGFSEGVTLVLLERLSEARRNGHEVLAVVRGSALNQDGASNGLSAPSGPAQRRVIRQALESCGLEPGDVDAVEAHGTGTALGDPIEANALLDTYGRDRDADRPLWLGSVKSNIGHTQAAAGVTGLLKVVLALRNGELPATLHVEEPTPHVDWSSGGVALLAGNQPWRRGERTRRAAVSAFGISGTNAHVIVEEAPQEVRPAPGQGLSPAVSTLVVAGKTMQRVSATAGMLADWMEGPGADVALADVAHTLNHHRSRQPKFGTVVARDRTQAIAGLRALAAGQHAPGVVNPAEGSPGPGTVFVFPGQGSQRAGMGEELAAAFPVFARIHQQVWDLLDVPDLDVNETGYAQPALFALQVALFGLLESWGVRPDAVVGHSVGELAAGYVSGLWSLEDACTLVSARARLMQALPAGGVMAAVPVSEDEARAVLGEGVEIAAVNGPSSVVLSGDEAAVLQAAEGLGKWTRLPTSHAFHSARMEPMLEEFRAVAEGLTYRTPQVAMAAGDQVMTAEYWVRQVRDTVRFGEQVASFEDAVFVELGADRSLARLVDGIAMLHGDHEAQAGMRREQPLPLGLRRLLTDLHNAGAAVDFSVLCPQGRLVDAPLPAWSHRFLFYDREGVDNRSPGGSTVAVHPLLLAAVDVPGHGGAVFTGRLSTDEQPWLAEHVVGGRTLVPGSVLVDLALAAGEDVGLPVLEELVLQRPLVLAGAGALLRMSVGAPDESGRRTIDVHAAEDVADLADAQWSQHATGTLAQGVAAGPRDTEQWPPEDAVRIPLDDHYDGLAEQGYEYGPSFQALVAYVAEDATATMLAEVALPGSIRSQQGLYAIHPALLDACFQSVGAHPDSQSVGSGLLVPLGVRRVRAYAPVRTARYCYTRVTKVELAGVEADIDVLDAHGTVLLAVCGLRIGTGVSERDKHNRVLNERLLTIEWHQRELPEMDPSGAGKWLLISDCAASDVTATRLADAFREHSAACTTMRWPLHDDQLAAADQLRDQVGSDEFSGVVVLTGPNTGTPHQGSADRGAEYVRRLVGIARELSDLPGAVPRMYVVTRGAQRVLADDCVNLEQGGLRGLLRTIGAEHPHLRATQIDVDEQTGVEQLARQLLATSEEDETAWRDNEWYVARLCPTPLRPQERRTIVADHQQSGMRLQIRTPGAIDSVAFEPAPDVEQPLRAGEVRVDVRATGVNFRDVLLALGMYPQKADMGTEAAGVVTAVGPDVDAFAPGDRVLGLFQGAFAPIAVTDHRLLARVPDGWSDADAAAVPIAYTTAHYALHDLAGLRAGQSVLIHAAAGGVGMAAVALARRAGAEVLATAGPAKHGTLRALGLDDEHIASSRETGFARKFRERTGGRGVDVVLNSLTGELLDESADLLAEDGVFVEMGKTDLRDAGDFRGRYAPFDLGEAGDDRLGEILREVVGLLGAGELDRLPVSAWELGIPQTGKSLVTLPPEQAQVFRPDGTVLITGGTGTLGRLLARHLVTEHGVRHLLLVSRRGADAPGSDELRAEIEDLGASAEIAACDTADRDALSALLDGLPRPLTGVVHAAGVLADGLVTSIDEPAVEQVLRAKVDAAWNLHELTANTGLSFFVLFSSAASVLAGPGQGVYAAANESLNALAALRRTRGLPAKALGWGLWAIGRAIAFAEQTGDAIAPEEGAYAFETLLRHNRAYSGYAPVIGSPWLTAFAQHSPFAEKFQSLGQNRSGTSKFLAELVDLPREEWPDRLRRLLELVRSHAAAVSGYGSADQLPERKAFKDLGFDSLAAVELRNRLGTATGVRLPSTLVFDHPTPLAVAEHLRDRLTSGEDNPIPLCQGDGEEMSTWLRRFGPPVEHRARLVCFPHAGAAADSYLDLARALAPEIDVHAVQYPGRQDRRDEEPLGTAGEIADEVAAVLRASGGDGPFALFGHSMGALIAYETARRLEREPGGGPLRLFVSGQTAPRVHERRTDLPGDDGLVDELRRLGTSEAALADEALLAMSLPVLRADYRVLRSYAWADGPPLRAGITALCGDADPLTATGDAERWLQHSVIPGRTRTFPGGHFYLGEQVTEVAGAVRRDLLRAGLAG

SEQ ID NO: 55 - protein, 4312 aa, Artificial Sequence
  MHO
MNPPCGPVRANCVHISIDFPMPVSKVSGPRSRTTSRRTPVRIGAVVVASSTSELLDGLAAVADGRPHASVVRGVARPSAPVVFVFPGQGAQWAGMAGELLGESRVFAAAMDACARAFEPVTDWTLAQVLDSPEQSRRVEVVQPALFAVQTSLAALWRSFGVTPDAVVGHSIGELAAAHVCGAAGAADAARAAALWSREMIPLVGNGDMAAVALSADEIEPRIARWDDDVVLAGVNGPRSVLLTGSPEPVARRVQELSAEGVRAQVINVSMAAHSAQVDDIAEGMRSALAWFAPGGSEVPFYASLTGGAVDTRELVADYWRRSFRLPVRFDEAIRSALEVGPGTFVEASPHPVLAAALQQTLDAEGSSAAVVPTLQRGQGGMRRFLLAAAQAFTGGVAVDWTAAYDDVGPNPALCRSSRRPRRKTSRPSPASTGTRHRTCCERLLAVVNGETAALAGREADAEATFRELGLDSVLAAQLRAKVSAAIGREVNIALLYDHPTPRALAEALAGLPQEIKHTPAVRTTSEDPIAIVSMACRLPGGVNTPQRLWELLREGGETLSGFPTDRGWDLARLHHPDPDNPGTSYVDKGGFLDDAAGFDAEFFGVSPREAAAMDPQQRLLLETSWELVENAGIDPHSLRGTATGVFLGVAKFGYGEDTAAAEDVEGYSVTGVAPAVASGRISYTMGLEGPSISVDTACSSSLVALHLAVESLRKGESSMAVVGGAAVMATPGVFVDFSRQRALAADGRSKAFGAGADGFGFSEGVTLVLLERLSEARRNGHEVLAVVRGSALNQDGASNGLSAPSGPAQRRVIRQALESCGLEPGDVDAVEAHGTGTALGDPIEANALLDTYGRDRDADRPLWLGSVKSNIGHTQAAAGVTGLLKVVLALRNGELPATLHVEEPTPHVDWSSGGVALLAGNQPWRRGERTRRAAVSAFGISGTNAHVIVEEAPQEVRPAPGQGLSPAVSTLVVAGKTMQRVSATAGMLADWMEGPGADVALADVAHTLNHHRSRQPKFGTVVARDRTQAIAGLRALAAGQHAPGVVNPAEGSPGPGTVFVFPGQGSQRAGMGEELAAAFPVFARIHQQVWDLLDVPDLDVNETGYAQPALFALQVALFGLLESWGVRPDAVVGHSVGELAAGYVSGLWSLEDACTLVSARARLMQALPAGGVMAAVPVSEDEARAVLGEGVEIAAVNGPSSVVLSGDEAAVLQAAEGLGKWTRLPTSHAFHSARMEPMLEEFRAVAEGLTYRTPQVAMAAGDQVMTAEYWVRQVRDTVRFGEQVASFEDAVFVELGADRSLARLVDGIAMLHGDHEAQAGMRREQPLPLGLRRLLTDLHNAGAAVDFSVLCPQGRLVDAPLPAWSHRFLFYDREGVDNRSPGGSTVAVHPLLLAAVDVPGHGGAVFTGRLSTDEQPWLAEHVVGGRTLVPGSVLVDLALAAGEDVGLPVLEELVLQRPLVLAGAGALLRMSVGAPDESGRRTIDVHAAEDVADLADAQWSQHATGTLAQGVAAGPRDTEQWPPEDAVRIPLDDHYDGLAEQGYEYGPSFQALVAYVAEDATATMLAEVALPGSIRSQQGLYAIHPALLDACFQSVGAHPDSQSVGSGLLVPLGVRRVRAYAPVRTARYCYTRVTKVELAGVEADIDVLDAHGTVLLAVCGLRIGTGVSERDKHNRVLNERLLTIEWHQRELPEMDPSGAGKWLLISDCAASDVTATRLADAFREHSAACTTMRWPLHDDQLAAADQLRDQVGSDEFSGVVVLTGPNTGTPHQGSADRGAEYVRRLVGIARELSDLPGAVPRMYVVTRGAQRVLADDCVNLEQGGLRGLLRTIGAEHPHLRATQIDVDEQTGVEQLARQLLATSEEDETAWRDNEWYVARLCPTPLRPQERRTIVADHQQSGMRLQIRTPGAIDSVAFEPAPDVEQPLRAGEVRVDVRATGVNFRDVLLALGMYPQKADMGTEAAGVVTAVGPDVDAFAPGDRVLGLFQGAFAPIAVTDHRLLARVPDGWSDADAAAVPIAYTTAHYALHDLAGLRAGQSVLIHAAAGGVGMAAVALARRAGAEVLATAGPAKHGTLRALGLDDEHIASSRETGFARKFRERTGGRGVDVVLNSLTGELLDESADLLAEDGVFVEMGKTDLRDAGDFRGRYAPFDLGEAGDDRLGEILREVVGLLGAGELDRLPVSAWELGIPQTGKSLVTLPPEQAQVFRPDGTVLITGGTGTLGRLLARHLVTEHGVRHLLLVSRRGADAPGSDELRAEIEDLGASAEIAACDTADRDALSALLDGLPRPLTGVVHAAGVLADGLVTSIDEPAVEQVLRAKVDAAWNLHELTANTGLSFFVLFSSAASVLAGPGQGVYAAANESLNALAALRRTRGLPAKALGWGLWAIGRAIAFAEQTGDAIAPEEGAYAFETLLRHNRAYSGYAPVIGSPWLTAFAQHSPFAEKFQSLGQNRSGTSKFLAELVDLPREEWPDRLRRLLELVRSHAAAVSGYGSADQLPERKAFKDLGFDSLAAVELRNRLGTATGVRLPSTLVFDHPTPLAVAEHLRDRLPGIGALVPAPVVIAAGRTEEPIAIVSMACRLPGGVNTPQRLWELLREGGETLSGFPTDRGWDLARLHHPDPDNPGTSYVDKGGFLDDAAGFDAEFFGVSPREAAAMDPQQRLLLETSWELVENAGIDPHSLRGTATGVFLGVAKFGYGEDTAAAEDVEGYSVTGVAPAVASGRISYTMGLEGPSISVDTACSSSLVALHLAVESLRKGESSMAVVGGAAVMATPGVFVDFSRQRALAADGRSKAFGAGADGFGFSEGVTLVLLERLSEARRNGHEVLAVVRGSALNQDGASNGLSAPSGPAQRRVIRQALESCGLEPGDVDAVEAHGTGTALGDPIEANALLDTYGRDRDADRPLWLGSVKSNIGHTQAAAGVTGLLKVVLALRNGELPATLHVEEPTPHVDWSSGGVALLAGNQPWRRGERTRRAAVSAFGISGTNAHVIVEEAPQEVRPAPGQGLSPAVSTLVVAGKTMQRVSATAGMLADWMEGPGADVALADVAHTLNHHRSRQPKFGTVVARDRTQAIAGLRALAAGQHAPGVVNPAEGSPGPGTVFVFPGQGSQRAGMGEELAAAFPVFARIHQQVWDLLDVPDLDVNETGYAQPALFALQVALFGLLESWGVRPDAVVGHSVGELAAGYVSGLWSLEDACTLVSARARLMQALPAGGVMAAVPVSEDEARAVLGEGVEIAAVNGPSSVVLSGDEAAVLQAAEGLGKWTRLPTSHAFHSARMEPMLEEFRAVAEGLTYRTPQVAMAAGDQVMTAEYWVRQVRDTVRFGEQVASFEDAVFVELGADRSLARLVDGIAMLHGDHEAQAADHRQITEAVADAYVLGHLPDFAALRRPHARKLDLPTYPFERRQYWFRDARERPEQPRDTGGPRTEAVRLLEDGRIEELAALLGGASDDQHTLQVLTKLAAQHNQQRTTRSIADDRYEIRWDRSTSPLSGADVDQAGSWIVVSDDADAVPPLVDLLAARNEPHQVVGLPASDADEERLAETLRAAATEDATLRIVHVAALEAGATPSMRSLLRMQHRILGGTRRVFRAAVAAELRGPIWIVTRGAQRVADTDTVAPHQSCLWGFGRAASLELPHVWGGLADLSEGGDNAADEWSALVDRIAAPHGSAVREDQLALRDRAVYTPRLARRSAPPSGTPLHLRGDGTVLITGGTGTLGRLLARHLVTEHGVRHLLLVSRRGADAPGSDELRAEIEDLGASAEIAACDTADRDALSALLDGLPRPLTGVVHAAGVLADGLVTSIDEPAVEQVLRAKVDAAWNLHELTANTGLSFFVLFSSAASVLAGPGQGVYAAANESLNALAALRRTRGLPAKALGWGLWAIGRAIAFAEQTGDAIAPEEGAYAFETLLRHNRAYSGYAPVIGSPWLTAFAQHSPFAEKFQSLGQNRSGTSKFLAELVDLPREEWPDRLRRLLELVRSHAAAVSGYGSADQLPERKAFKDLGFDSLAAVELRNRLGTATGVRLPSTLVFDHPTPLAVAEHLRDRLTSGEDNPIPLCQGDGEEMSTWLRRFGPPVEHRARLVCFPHAGAAADSYLDLARALAPEIDVHAVQYPGRQDRRDEEPLGTAGEIADEVAAVLRASGGDGPFALFGHSMGALIAYETARRLEREPGGGPLRLFVSGQTAPRVHERRTDLPGDDGLVDELRRLGTSEAALADEALLAMSLPVLRADYRVLRSYAWADGPPLRAGITALCGDADPLTATGDAERWLQHSVIPGRTRTFPGGHFYLGEQVTEVAGAVRRDLLRAGLAG

SEQ ID NO: 56 - protein, 4425 aa, Artificial Sequence
  MHS
MNPPCGPVRANCVHISIDFPMPVSKVSGPRSRTTSRRTPVRIGAVVVASSTSELLDGLAAVADGRPHASVVRGVARPSAPVVFVFPGQGAQWAGMAGELLGESRVFAAAMDACARAFEPVTDWTLAQVLDSPEQSRRVEVVQPALFAVQTSLAALWRSFGVTPDAVVGHSIGELAAAHVCGAAGAADAARAAALWSREMIPLVGNGDMAAVALSADEIEPRIARWDDDVVLAGVNGPRSVLLTGSPEPVARRVQELSAEGVRAQVINVSMAAHSAQVDDIAEGMRSALAWFAPGGSEVPFYASLTGGAVDTRELVADYWRRSFRLPVRFDEAIRSALEVGPGTFVEASPHPVLAAALQQTLDAEGSSAAVVPTLQRGQGGMRRFLLAAAQAFTGGVAVDWTAAYDDVGPNPALCRSSRRPRRKTSRPSPASTGTRHRTCCERLLAVVNGETAALAGREADAEATFRELGLDSVLAAQLRAKVSAAIGREVNIALLYDHPTPRALAEALAGLPQEIKHTPAVRTTSEDPIAIVSMACRLPGGVNTPQRLWELLREGGETLSGFPTDRGWDLARLHHPDPDNPGTSYVDKGGFLDDAAGFDAEFFGVSPREAAAMDPQQRLLLETSWELVENAGIDPHSLRGTATGVFLGVAKFGYGEDTAAAEDVEGYSVTGVAPAVASGRISYTMGLEGPSISVDTACSSSLVALHLAVESLRKGESSMAVVGGAAVMATPGVFVDFSRQRALAADGRSKAFGAGADGFGFSEGVTLVLLERLSEARRNGHEVLAVVRGSALNQDGASNGLSAPSGPAQRRVIRQALESCGLEPGDVDAVEAHGTGTALGDPIEANALLDTYGRDRDADRPLWLGSVKSNIGHTQAAAGVTGLLKVVLALRNGELPATLHVEEPTPHVDWSSGGVALLAGNQPWRRGERTRRAAVSAFGISGTNAHVIVEEAPQEVRPAPGQGLSPAVSTLVVAGKTMQRVSATAGMLADWMEGPGADVALADVAHTLNHHRSRQPKFGTVVARDRTQAIAGLRALAAGQHAPGVVNPAEGSPGPGTVFVFPGQGSQRAGMGEELAAAFPVFARIHQQVWDLLDVPDLDVNETGYAQPALFALQVALFGLLESWGVRPDAVVGHSVGELAAGYVSGLWSLEDACTLVSARARLMQALPAGGVMAAVPVSEDEARAVLGEGVEIAAVNGPSSVVLSGDEAAVLQAAEGLGKWTRLPTSHAFHSARMEPMLEEFRAVAEGLTYRTPQVAMAAGDQVMTAEYWVRQVRDTVRFGEQVASFEDAVFVELGADRSLARLVDGIAMLHGDHEAQAGMRREQPLPLGLRRLLTDLHNAGAAVDFSVLCPQGRLVDAPLPAWSHRFLFYDREGVDNRSPGGSTVAVHPLLLAAVDVPGHGGAVFTGRLSTDEQPWLAEHVVGGRTLVPGSVLVDLALAAGEDVGLPVLEELVLQRPLVLAGAGALLRMSVGAPDESGRRTIDVHAAEDVADLADAQWSQHATGTLAQGVAAGPRDTEQWPPEDAVRIPLDDHYDGLAEQGYEYGPSFQALVAYVAEDATATMLAEVALPGSIRSQQGLYAIHPALLDACFQSVGAHPDSQSVGSGLLVPLGVRRVRAYAPVRTARYCYTRVTKVELAGVEADIDVLDAHGTVLLAVCGLRIGTGVSERDKHNRVLNERLLTIEWHQRELPEMDPSGAGKWLLISDCAASDVTATRLADAFREHSAACTTMRWPLHDDQLAAADQLRDQVGSDEFSGVVVLTGPNTGTPHQGSADRGAEYVRRLVGIARELSDLPGAVPRMYVVTRGAQRVLADDCVNLEQGGLRGLLRTIGAEHPHLRATQIDVDEQTGVEQLARQLLATSEEDETAWRDNEWYVARLCPTPLRPQERRTIVADHQQSGMRLQIRTPGAIDSVAFEPAPDVEQPLRAGEVRVDVRATGVNFRDVLLALGMYPQKADMGTEAAGVVTAVGPDVDAFAPGDRVLGLFQGAFAPIAVTDHRLLARVPDGWSDADAAAVPIAYTTAHYALHDLAGLRAGQSVLIHAAAGGVGMAAVALARRAGAEVLATAGPAKHGTLRALGLDDEHIASSRETGFARKFRERTGGRGVDVVLNSLTGELLDESADLLAEDGVFVEMGKTDLRDAGDFRGRYAPFDLGEAGDDRLGEILREVVGLLGAGELDRLPVSAWELGIPQTGKSLVTLPPEQAQVFRPDGTVLITGGTGTLGRLLARHLVTEHGVRHLLLVSRRGADAPGSDELRAEIEDLGASAEIAACDTADRDALSALLDGLPRPLTGVVHAAGVLADGLVTSIDEPAVEQVLRAKVDAAWNLHELTANTGLSFFVLFSSAASVLAGPGQGVYAAANESLNALAALRRTRGLPAKALGWGLWAIGRAIAFAEQTGDAIAPEEGAYAFETLLRHNRAYSGYAPVIGSPWLTAFAQHSPFAEKFQSLGQNRSGTSKFLAELVDLPREEWPDRLRRLLELVRSHAAAVSGYGSADQLPERKAFKDLGFDSLAAVELRNRLGTATGVRLPSTLVFDHPTPLAVAEHLRDRLLPVEQPFVHSPEERYRPFALTDVQQAYLVGRQPGFALGGVGSHFFVEFEIADLDIHRLEKVWNRLIARHDMLRAVVRDGQQRVLEQTPPWVIPAHILHSPEEALQVRDRLAHQVLNPEVWPVFDLQVGFVDGMPARLWLCLDNLLLDGLSMQILLSELEHGYRYPQQLPPPLPITFRDYLQQPALRTPNPDSLAWWQTQLDDIPPAPALPLRCLPQDVETPRFARLYGAMDSARWRRLKQRAADAHLTPSAVLLSVWSTVLAAWSAQPDFTLNLTLFDRRPLHPQINQILGDFTSLMLLSWHPGESWLQSARLLQQRLSESLNHRDVSAIRVMRQLARRQNVPAVPMPVVFTSALGFEQDNFLARRNLLKPVWGISQTPQVWLDHQVYESEGELRFNWDFVAALFPDGQVERQFAQYCALLNRMAEDDSSWQLPLADLVPPLKVTERRARRLRPERAQPRIAADKSSVSLICDTFREVVGEPVAPAENFFEAGATSLNLVQLHVLLQRHEFATLTLLDLFTHPSPVALANYLAGVALEEKTKRVRPVRRRQRRIQHLPLVAAQPGIWMAEKLSELPSAWSVAHYVELTGEVDSPLLARAVVAGLAQADTLRMRFTEDNGEVWQWVDDALTFELPEIIDLRTNIDPHGTAQALMQADLQQDLRVDSGKPLVFHQLIQVADNRWYWYQRYHHLLVDGFSFPAITRQIANIYCTWLRGEPTPASPFTPFADVVEEYQQYRESEAWQRDAAFWAEQRRQLPPPASLSPAPLPGRSASADILRLKLEFTDGEFRQLATQLSGVQRTDLALALAALWLGRLCNRMDYAAGFIFMRRLGSAALTATGPVLNVLPLGIHIGNPSFSELLTRVREVALGAYAHQHIPFEMLVEALQPERNLSHTPLFQVMFVLQNAPASQLELTGITANPIKVKSTTTKFDLTLIMQNTASGLVGVWEYNTDLFDASTIERMTGHFVTLLEGVIANPQQPISQLPILTTVEQQQLLVEWNNTQTDYPADKCIHQLFEEQVERTPDAVAVVFGNQQLSYREMREQVVALANLLRERGVKPGDSVAVALPRSVFLTLALHAIVEAGAAWLPLDTGYPDDRLKMMLEDARPSLLITTDDQLPRFSDVPNLTSLCYNAPLTPQGSAPLQLSQPHHTAYIIFTSGSTGRPKGVMVGQTAIVNRLLWMQNHYPLTGEDVVAQKTPCSFDVSVWEFFWPFIAGAKLVMAEPEAHRDPLAMQQFFAEYGVTTTHFVPSMLAAFVASLTPQTARQSCATLKQVFCSGEALPADLCREWQQLTGAPLHNLYGPTEAAVDVSWYPAFGEELAQVRGSSVPIGYPVWNTGLRILDAMMHPVPPGVAGDLYLTGIQLAQGYLGRPDLTASRFIADPFAPGERMYRTGDVARWLDNGAVEYLGRSDDQLKIRGQRIELGEIDRVMQALPDVEQAVASCAIAREDIPGNKHLVAYIVPQEEQTCTERSRSTLTVSFVRSFLKEKLPEYMVPSAIVILDALPLTPNGKLDRRALPAPDLHSQLETIIAAAFSSLLGCDVQDADADFFALGGHSLLAMKLAAQLSRQVARQVTPGQVMVASTVAKLATIIDAELDKYVAPRNPITSGEDNPIPLCQGDGEEMSTWLRRFGPPVEHRARLVCFPHAGAAADSYLDLARALAPEIDVHAVQYPGRQDRRDEEPLGTAGEIADEVAAVLRASGGDGPFALFGHSMGALIAYETARRLEREPGGGPLRLFVSGQTAPRVHERRTDLPGDDGLVDELRRLGTSEAALADEALLAMSLPVLRADYRVLRSYAWADGPPLRAGITALCGDADPLTATGDAERWLQHSVIPGRTRTFPGGHFYLGEQVTEVAGAVRRDLLRAGLAG

SEQ ID NO: 57 - protein, 3871 aa, Artificial Sequence
  MOC
MNPPCGPVRANCVHISIDFPMPVSKVSGPRSRTTSRRTPVRIGAVVVASSTSELLDGLAAVADGRPHASVVRGVARPSAPVVFVFPGQGAQWAGMAGELLGESRVFAAAMDACARAFEPVTDWTLAQVLDSPEQSRRVEVVQPALFAVQTSLAALWRSFGVTPDAVVGHSIGELAAAHVCGAAGAADAARAAALWSREMIPLVGNGDMAAVALSADEIEPRIARWDDDVVLAGVNGPRSVLLTGSPEPVARRVQELSAEGVRAQVINVSMAAHSAQVDDIAEGMRSALAWFAPGGSEVPFYASLTGGAVDTRELVADYWRRSFRLPVRFDEAIRSALEVGPGTFVEASPHPVLAAALQQTLDAEGSSAAVVPTLQRGQGGMRRFLLAAAQAFTGGVAVDWTAAYDDVGPNPALCRSSRRPRRKTSRPSPASTGTRHRTCCERLLAVVNGETAALAGREADAEATFRELGLDSVLAAQLRAKVSAAIGREVNIALLYDHPTPRALAEALAGLPQEIKHTPAVRTTSEDPIAIVSMACRLPGGVNTPQRLWELLREGGETLSGFPTDRGWDLARLHHPDPDNPGTSYVDKGGFLDDAAGFDAEFFGVSPREAAAMDPQQRLLLETSWELVENAGIDPHSLRGTATGVFLGVAKFGYGEDTAAAEDVEGYSVTGVAPAVASGRISYTMGLEGPSISVDTACSSSLVALHLAVESLRKGESSMAVVGGAAVMATPGVFVDFSRQRALAADGRSKAFGAGADGFGFSEGVTLVLLERLSEARRNGHEVLAVVRGSALNQDGASNGLSAPSGPAQRRVIRQALESCGLEPGDVDAVEAHGTGTALGDPIEANALLDTYGRDRDADRPLWLGSVKSNIGHTQAAAGVTGLLKVVLALRNGELPATLHVEEPTPHVDWSSGGVALLAGNQPWRRGERTRRAAVSAFGISGTNAHVIVEEAPQEVRPAPGQGLSPAVSTLVVAGKTMQRVSATAGMLADWMEGPGADVALADVAHTLNHHRSRQPKFGTVVARDRTQAIAGLRALAAGQHAPGVVNPAEGSPGPGTVFVFPGQGSQRAGMGEELAAAFPVFARIHQQVWDLLDVPDLDVNETGYAQPALFALQVALFGLLESWGVRPDAVVGHSVGELAAGYVSGLWSLEDACTLVSARARLMQALPAGGVMAAVPVSEDEARAVLGEGVEIAAVNGPSSVVLSGDEAAVLQAAEGLGKWTRLPTSHAFHSARMEPMLEEFRAVAEGLTYRTPQVAMAAGDQVMTAEYWVRQVRDTVRFGEQVASFEDAVFVELGADRSLARLVDGIAMLHGDHEAQAADHRQITEAVADAYVLGHLPDFAALRRPHARKLDLPTYPFERRQYWFRDARERPEQPRDTGGPRTEAVRLLEDGRIEELAALLGGASDDQHTLQVLTKLAAQHNQQRTTRSIADDRYEIRWDRSTSPLSGADVDQAGSWIVVSDDADAVPPLVDLLAARNEPHQVVGLPASDADEERLAETLRAAATEDATLRIVHVAALEAGATPSMRSLLRMQHRILGGTRRVFRAAVAAELRGPIWIVTRGAQRVADTDTVAPHQSCLWGFGRAASLELPHVWGGLADLSEGGDNAADEWSALVDRIAAPHGSAVREDQLALRDRAVYTPRLARRSAPPSGTPLHLRGDGTVLITGGTGTLGRLLARHLVTEHGVRHLLLVSRRGADAPGSDELRAEIEDLGASAEIAACDTADRDALSALLDGLPRPLTGVVHAAGVLADGLVTSIDEPAVEQVLRAKVDAAWNLHELTANTGLSFFVLFSSAASVLAGPGQGVYAAANESLNALAALRRTRGLPAKALGWGLWAIGRAIAFAEQTGDAIAPEEGAYAFETLLRHNRAYSGYAPVIGSPWLTAFAQHSPFAEKFQSLGQNRSGTSKFLAELVDLPREEWPDRLRRLLELVRSHAAAVSGYGSADQLPERKAFKDLGFDSLAAVELRNRLGTATGVRLPSTLVFDHPTPLAVAEHLRDRLLPVEQPFVHSPEERYRPFALTDVQQAYLVGRQPGFALGGVGSHFFVEFEIADLDIHRLEKVWNRLIARHDMLRAVVRDGQQRVLEQTPPWVIPAHILHSPEEALQVRDRLAHQVLNPEVWPVFDLQVGFVDGMPARLWLCLDNLLLDGLSMQILLSELEHGYRYPQQLPPPLPITFRDYLQQPALRTPNPDSLAWWQTQLDDIPPAPALPLRCLPQDVETPRFARLYGAMDSARWRRLKQRAADAHLTPSAVLLSVWSTVLAAWSAQPDFTLNLTLFDRRPLHPQINQILGDFTSLMLLSWHPGESWLQSARLLQQRLSESLNHRDVSAIRVMRQLARRQNVPAVPMPVVFTSALGFEQDNFLARRNLLKPVWGISQTPQVWLDHQVYESEGELRFNWDFVAALFPDGQVERQFAQYCALLNRMAEDDSSWQLPLADLVPPLKVTERRARRLRPERAQPRIAADKSSVSLICDTFREVVGEPVAPAENFFEAGATSLNLVQLHVLLQRHEFATLTLLDLFTHPSPVALANYLAGVALEEKTKRVRPVRRRQRRIGEPFPLAPMQHAMWVGRHDHQQLGGVAGHLYVEFDGARVDPDRLRAAATRLALRHPMLRVQFLPDGTQRIPPAAGSRDFPISVADLRHVAPDVVDQRLAGIRDAKSHQQLDGAVFELALTLLPGERTRLHVDLDMQAADAMSYRILLADLAALYDGREPPALGYTYREYRQAIEAEETLPQPVRDADRDWWAQRIPQLPDPPALPTRAGGERDRRRSTRRWHWLDPQTRDALFARARARGITPAMTLAAAFANVLARWSASSRFLLNLPLFSRQALHPDVDLLVGDFTSSLLLDVDLGDTVSNLARKNQLTFTEDWEHRHWSGVELLRELKRQQRYPHGAPVVFTSNLGRSLYSSRAESPLGEPEWGISQTPQVWIDHLAFEHHGEVWLQWDSNDALFPPALVETLFDAYCQLINQLCDDESAWQKPFADMMPASQRAIRERVNATGAPIPEGLLHEGIFRIALQQPQALAVTDMRYQWNSYREMREQVVALANLLRERGVKPGDSVAVALPRSVFLTLALHAIVEAGAAWLPLDTGYPDDRLKMMLEDARPSLLITTDDQLPRFSDVPNLTSLCYNAPLTPQGSAPLQLSQPHHTAYIIFTSGSTGRPKGVMVGQTAIVNRLLWMQNHYPLTGEDVVAQKTPCSFDVSVWEFFWPFIAGAKLVMAEPEAHRDPLAMQQFFAEYGVTTTHFVPSMLAAFVASLTPQTARQSCATLKQVFCSGEALPADLCREWQQLTGAPLHNLYGPTEAAVDVSWYPAFGEELAQVRGSSVPIGYPVWNTGLRILDAMMHPVPPGVAGDLYLTGIQLAQGYLGRPDLTASRFIADPFAPGERMYRTGDVARWLDNGAVEYLGRSDDQLKIRGQRIELGEIDRVMQALPDVEQAVASCAIAREDIPGNKHLVAYIVPQEEQTCTERSRSTLTVSFVRSFLKEKLPEYMVPSAIVILDALPLTPNGKLDRRALPAPDLHSQLLDKYVAPRNPIETIIAAAFSSLLGCDVQDADADFFALGGHSLLAMKLAAQLSRQVARQVTPGQVMVASTVAKLATIIDAETSGEDNPIPLCQGDGEEMSTWLRRFGPPVEHRARLVCFPHAGAAADSYLDLARALAPEIDVHAVQYPGRQDRRDEEPLGTAGEIADEVAAVLRASGGDGPFALFGHSMGALIAYETARRLEREPGGGPLRLFVSGQTAPRVHERRTDLPGDDGLVDELRRLGTSEAALADEALLAMSLPVLRADYRVLRSYAWADGPPLRAGITALCGDADPLTATGDAERWLQHSVIPGRTRTFPGGHFYLGEQVTEVAGAVRRDLLRAGLAG

SEQ ID NO: 58 - protein, 4312 aa, Artificial Sequence
  MOH
MNPPCGPVRANCVHISIDFPMPVSKVSGPRSRTTSRRTPVRIGAVVVASSTSELLDGLAAVADGRPHASVVRGVARPSAPVVFVFPGQGAQWAGMAGELLGESRVFAAAMDACARAFEPVTDWTLAQVLDSPEQSRRVEVVQPALFAVQTSLAALWRSFGVTPDAVVGHSIGELAAAHVCGAAGAADAARAAALWSREMIPLVGNGDMAAVALSADEIEPRIARWDDDVVLAGVNGPRSVLLTGSPEPVARRVQELSAEGVRAQVINVSMAAHSAQVDDIAEGMRSALAWFAPGGSEVPFYASLTGGAVDTRELVADYWRRSFRLPVRFDEAIRSALEVGPGTFVEASPHPVLAAALQQTLDAEGSSAAVVPTLQRGQGGMRRFLLAAAQAFTGGVAVDWTAAYDDVGPNPALCRSSRRPRRKTSRPSPASTGTRHRTCCERLLAVVNGETAALAGREADAEATFRELGLDSVLAAQLRAKVSAAIGREVNIALLYDHPTPRALAEALAGLPQEIKHTPAVRTTSEDPIAIVSMACRLPGGVNTPQRLWELLREGGETLSGFPTDRGWDLARLHHPDPDNPGTSYVDKGGFLDDAAGFDAEFFGVSPREAAAMDPQQRLLLETSWELVENAGIDPHSLRGTATGVFLGVAKFGYGEDTAAAEDVEGYSVTGVAPAVASGRISYTMGLEGPSISVDTACSSSLVALHLAVESLRKGESSMAVVGGAAVMATPGVFVDFSRQRALAADGRSKAFGAGADGFGFSEGVTLVLLERLSEARRNGHEVLAVVRGSALNQDGASNGLSAPSGPAQRRVIRQALESCGLEPGDVDAVEAHGTGTALGDPIEANALLDTYGRDRDADRPLWLGSVKSNIGHTQAAAGVTGLLKVVLALRNGELPATLHVEEPTPHVDWSSGGVALLAGNQPWRRGERTRRAAVSAFGISGTNAHVIVEEAPQEVRPAPGQGLSPAVSTLVVAGKTMQRVSATAGMLADWMEGPGADVALADVAHTLNHHRSRQPKFGTVVARDRTQAIAGLRALAAGQHAPGVVNPAEGSPGPGTVFVFPGQGSQRAGMGEELAAAFPVFARIHQQVWDLLDVPDLDVNETGYAQPALFALQVALFGLLESWGVRPDAVVGHSVGELAAGYVSGLWSLEDACTLVSARARLMQALPAGGVMAAVPVSEDEARAVLGEGVEIAAVNGPSSVVLSGDEAAVLQAAEGLGKWTRLPTSHAFHSARMEPMLEEFRAVAEGLTYRTPQVAMAAGDQVMTAEYWVRQVRDTVRFGEQVASFEDAVFVELGADRSLARLVDGIAMLHGDHEAQAADHRQITEAVADAYVLGHLPDFAALRRPHARKLDLPTYPFERRQYWFRDARERPEQPRDTGGPRTEAVRLLEDGRIEELAALLGGASDDQHTLQVLTKLAAQHNQQRTTRSIADDRYEIRWDRSTSPLSGADVDQAGSWIVVSDDADAVPPLVDLLAARNEPHQVVGLPASDADEERLAETLRAAATEDATLRIVHVAALEAGATPSMRSLLRMQHRILGGTRRVFRAAVAAELRGPIWIVTRGAQRVADTDTVAPHQSCLWGFGRAASLELPHVWGGLADLSEGGDNAADEWSALVDRIAAPHGSAVREDQLALRDRAVYTPRLARRSAPPSGTPLHLRGDGTVLITGGTGTLGRLLARHLVTEHGVRHLLLVSRRGADAPGSDELRAEIEDLGASAEIAACDTADRDALSALLDGLPRPLTGVVHAAGVLADGLVTSIDEPAVEQVLRAKVDAAWNLHELTANTGLSFFVLFSSAASVLAGPGQGVYAAANESLNALAALRRTRGLPAKALGWGLWAIGRAIAFAEQTGDAIAPEEGAYAFETLLRHNRAYSGYAPVIGSPWLTAFAQHSPFAEKFQSLGQNRSGTSKFLAELVDLPREEWPDRLRRLLELVRSHAAAVSGYGSADQLPERKAFKDLGFDSLAAVELRNRLGTATGVRLPSTLVFDHPTPLAVAEHLRDRLPGIGALVPAPVVIAAGRTEEPIAIVSMACRLPGGVNTPQRLWELLREGGETLSGFPTDRGWDLARLHHPDPDNPGTSYVDKGGFLDDAAGFDAEFFGVSPREAAAMDPQQRLLLETSWELVENAGIDPHSLRGTATGVFLGVAKFGYGEDTAAAEDVEGYSVTGVAPAVASGRISYTMGLEGPSISVDTACSSSLVALHLAVESLRKGESSMAVVGGAAVMATPGVFVDFSRQRALAADGRSKAFGAGADGFGFSEGVTLVLLERLSEARRNGHEVLAVVRGSALNQDGASNGLSAPSGPAQRRVIRQALESCGLEPGDVDAVEAHGTGTALGDPIEANALLDTYGRDRDADRPLWLGSVKSNIGHTQAAAGVTGLLKVVLALRNGELPATLHVEEPTPHVDWSSGGVALLAGNQPWRRGERTRRAAVSAFGISGTNAHVIVEEAPQEVRPAPGQGLSPAVSTLVVAGKTMQRVSATAGMLADWMEGPGADVALADVAHTLNHHRSRQPKFGTVVARDRTQAIAGLRALAAGQHAPGVVNPAEGSPGPGTVFVFPGQGSQRAGMGEELAAAFPVFARIHQQVWDLLDVPDLDVNETGYAQPALFALQVALFGLLESWGVRPDAVVGHSVGELAAGYVSGLWSLEDACTLVSARARLMQALPAGGVMAAVPVSEDEARAVLGEGVEIAAVNGPSSVVLSGDEAAVLQAAEGLGKWTRLPTSHAFHSARMEPMLEEFRAVAEGLTYRTPQVAMAAGDQVMTAEYWVRQVRDTVRFGEQVASFEDAVFVELGADRSLARLVDGIAMLHGDHEAQAGMRREQPLPLGLRRLLTDLHNAGAAVDFSVLCPQGRLVDAPLPAWSHRFLFYDREGVDNRSPGGSTVAVHPLLLAAVDVPGHGGAVFTGRLSTDEQPWLAEHVVGGRTLVPGSVLVDLALAAGEDVGLPVLEELVLQRPLVLAGAGALLRMSVGAPDESGRRTIDVHAAEDVADLADAQWSQHATGTLAQGVAAGPRDTEQWPPEDAVRIPLDDHYDGLAEQGYEYGPSFQALVAYVAEDATATMLAEVALPGSIRSQQGLYAIHPALLDACFQSVGAHPDSQSVGSGLLVPLGVRRVRAYAPVRTARYCYTRVTKVELAGVEADIDVLDAHGTVLLAVCGLRIGTGVSERDKHNRVLNERLLTIEWHQRELPEMDPSGAGKWLLISDCAASDVTATRLADAFREHSAACTTMRWPLHDDQLAAADQLRDQVGSDEFSGVVVLTGPNTGTPHQGSADRGAEYVRRLVGIARELSDLPGAVPRMYVVTRGAQRVLADDCVNLEQGGLRGLLRTIGAEHPHLRATQIDVDEQTGVEQLARQLLATSEEDETAWRDNEWYVARLCPTPLRPQERRTIVADHQQSGMRLQIRTPGAIDSVAFEPAPDVEQPLRAGEVRVDVRATGVNFRDVLLALGMYPQKADMGTEAAGVVTAVGPDVDAFAPGDRVLGLFQGAFAPIAVTDHRLLARVPDGWSDADAAAVPIAYTTAHYALHDLAGLRAGQSVLIHAAAGGVGMAAVALARRAGAEVLATAGPAKHGTLRALGLDDEHIASSRETGFARKFRERTGGRGVDVVLNSLTGELLDESADLLAEDGVFVEMGKTDLRDAGDFRGRYAPFDLGEAGDDRLGEILREVVGLLGAGELDRLPVSAWELGIPQTGKSLVTLPPEQAQVFRPDGTVLITGGTGTLGRLLARHLVTEHGVRHLLLVSRRGADAPGSDELRAEIEDLGASAEIAACDTADRDALSALLDGLPRPLTGVVHAAGVLADGLVTSIDEPAVEQVLRAKVDAAWNLHELTANTGLSFFVLFSSAASVLAGPGQGVYAAANESLNALAALRRTRGLPAKALGWGLWAIGRAIAFAEQTGDAIAPEEGAYAFETLLRHNRAYSGYAPVIGSPWLTAFAQHSPFAEKFQSLGQNRSGTSKFLAELVDLPREEWPDRLRRLLELVRSHAAAVSGYGSADQLPERKAFKDLGFDSLAAVELRNRLGTATGVRLPSTLVFDHPTPLAVAEHLRDRLTSGEDNPIPLCQGDGEEMSTWLRRFGPPVEHRARLVCFPHAGAAADSYLDLARALAPEIDVHAVQYPGRQDRRDEEPLGTAGEIADEVAAVLRASGGDGPFALFGHSMGALIAYETARRLEREPGGGPLRLFVSGQTAPRVHERRTDLPGDDGLVDELRRLGTSEAALADEALLAMSLPVLRADYRVLRSYAWADGPPLRAGITALCGDADPLTATGDAERWLQHSVIPGRTRTFPGGHFYLGEQVTEVAGAVRRDLLRAGLAG

SEQ ID NO: 59 - protein, 3761 aa, Artificial Sequence
  MOO
MNPPCGPVRANCVHISIDFPMPVSKVSGPRSRTTSRRTPVRIGAVVVASSTSELLDGLAAVADGRPHASVVRGVARPSAPVVFVFPGQGAQWAGMAGELLGESRVFAAAMDACARAFEPVTDWTLAQVLDSPEQSRRVEVVQPALFAVQTSLAALWRSFGVTPDAVVGHSIGELAAAHVCGAAGAADAARAAALWSREMIPLVGNGDMAAVALSADEIEPRIARWDDDVVLAGVNGPRSVLLTGSPEPVARRVQELSAEGVRAQVINVSMAAHSAQVDDIAEGMRSALAWFAPGGSEVPFYASLTGGAVDTRELVADYWRRSFRLPVRFDEAIRSALEVGPGTFVEASPHPVLAAALQQTLDAEGSSAAVVPTLQRGQGGMRRFLLAAAQAFTGGVAVDWTAAYDDVGPNPALCRSSRRPRRKTSRPSPASTGTRHRTCCERLLAVVNGETAALAGREADAEATFRELGLDSVLAAQLRAKVSAAIGREVNIALLYDHPTPRALAEALAGLPQEIKHTPAVRTTSEDPIAIVSMACRLPGGVNTPQRLWELLREGGETLSGFPTDRGWDLARLHHPDPDNPGTSYVDKGGFLDDAAGFDAEFFGVSPREAAAMDPQQRLLLETSWELVENAGIDPHSLRGTATGVFLGVAKFGYGEDTAAAEDVEGYSVTGVAPAVASGRISYTMGLEGPSISVDTACSSSLVALHLAVESLRKGESSMAVVGGAAVMATPGVFVDFSRQRALAADGRSKAFGAGADGFGFSEGVTLVLLERLSEARRNGHEVLAVVRGSALNQDGASNGLSAPSGPAQRRVIRQALESCGLEPGDVDAVEAHGTGTALGDPIEANALLDTYGRDRDADRPLWLGSVKSNIGHTQAAAGVTGLLKVVLALRNGELPATLHVEEPTPHVDWSSGGVALLAGNQPWRRGERTRRAAVSAFGISGTNAHVIVEEAPQEVRPAPGQGLSPAVSTLVVAGKTMQRVSATAGMLADWMEGPGADVALADVAHTLNHHRSRQPKFGTVVARDRTQAIAGLRALAAGQHAPGVVNPAEGSPGPGTVFVFPGQGSQRAGMGEELAAAFPVFARIHQQVWDLLDVPDLDVNETGYAQPALFALQVALFGLLESWGVRPDAVVGHSVGELAAGYVSGLWSLEDACTLVSARARLMQALPAGGVMAAVPVSEDEARAVLGEGVEIAAVNGPSSVVLSGDEAAVLQAAEGLGKWTRLPTSHAFHSARMEPMLEEFRAVAEGLTYRTPQVAMAAGDQVMTAEYWVRQVRDTVRFGEQVASFEDAVFVELGADRSLARLVDGIAMLHGDHEAQAADHRQITEAVADAYVLGHLPDFAALRRPHARKLDLPTYPFERRQYWFRDARERPEQPRDTGGPRTEAVRLLEDGRIEELAALLGGASDDQHTLQVLTKLAAQHNQQRTTRSIADDRYEIRWDRSTSPLSGADVDQAGSWIVVSDDADAVPPLVDLLAARNEPHQVVGLPASDADEERLAETLRAAATEDATLRIVHVAALEAGATPSMRSLLRMQHRILGGTRRVFRAAVAAELRGPIWIVTRGAQRVADTDTVAPHQSCLWGFGRAASLELPHVWGGLADLSEGGDNAADEWSALVDRIAAPHGSAVREDQLALRDRAVYTPRLARRSAPPSGTPLHLRGDGTVLITGGTGTLGRLLARHLVTEHGVRHLLLVSRRGADAPGSDELRAEIEDLGASAEIAACDTADRDALSALLDGLPRPLTGVVHAAGVLADGLVTSIDEPAVEQVLRAKVDAAWNLHELTANTGLSFFVLFSSAASVLAGPGQGVYAAANESLNALAALRRTRGLPAKALGWGLWAIGRAIAFAEQTGDAIAPEEGAYAFETLLRHNRAYSGYAPVIGSPWLTAFAQHSPFAEKFQSLGQNRSGTSKFLAELVDLPREEWPDRLRRLLELVRSHAAAVSGYGSADQLPERKAFKDLGFDSLAAVELRNRLGTATGVRLPSTLVFDHPTPLAVAEHLRDRLPGIGALVPAPVVIAAGRTEEPIAIVSMACRLPGGVNTPQRLWELLREGGETLSGFPTDRGWDLARLHHPDPDNPGTSYVDKGGFLDDAAGFDAEFFGVSPREAAAMDPQQRLLLETSWELVENAGIDPHSLRGTATGVFLGVAKFGYGEDTAAAEDVEGYSVTGVAPAVASGRISYTMGLEGPSISVDTACSSSLVALHLAVESLRKGESSMAVVGGAAVMATPGVFVDFSRQRALAADGRSKAFGAGADGFGFSEGVTLVLLERLSEARRNGHEVLAVVRGSALNQDGASNGLSAPSGPAQRRVIRQALESCGLEPGDVDAVEAHGTGTALGDPIEANALLDTYGRDRDADRPLWLGSVKSNIGHTQAAAGVTGLLKVVLALRNGELPATLHVEEPTPHVDWSSGGVALLAGNQPWRRGERTRRAAVSAFGISGTNAHVIVEEAPQEVRPAPGQGLSPAVSTLVVAGKTMQRVSATAGMLADWMEGPGADVALADVAHTLNHHRSRQPKFGTVVARDRTQAIAGLRALAAGQHAPGVVNPAEGSPGPGTVFVFPGQGSQRAGMGEELAAAFPVFARIHQQVWDLLDVPDLDVNETGYAQPALFALQVALFGLLESWGVRPDAVVGHSVGELAAGYVSGLWSLEDACTLVSARARLMQALPAGGVMAAVPVSEDEARAVLGEGVEIAAVNGPSSVVLSGDEAAVLQAAEGLGKWTRLPTSHAFHSARMEPMLEEFRAVAEGLTYRTPQVAMAAGDQVMTAEYWVRQVRDTVRFGEQVASFEDAVFVELGADRSLARLVDGIAMLHGDHEAQAADHRQITEAVADAYVLGHLPDFAALRRPHARKLDLPTYPFERRQYWFRDARERPEQPRDTGGPRTEAVRLLEDGRIEELAALLGGASDDQHTLQVLTKLAAQHNQQRTTRSIADDRYEIRWDRSTSPLSGADVDQAGSWIVVSDDADAVPPLVDLLAARNEPHQVVGLPASDADEERLAETLRAAATEDATLRIVHVAALEAGATPSMRSLLRMQHRILGGTRRVFRAAVAAELRGPIWIVTRGAQRVADTDTVAPHQSCLWGFGRAASLELPHVWGGLADLSEGGDNAADEWSALVDRIAAPHGSAVREDQLALRDRAVYTPRLARRSAPPSGTPLHLRGDGTVLITGGTGTLGRLLARHLVTEHGVRHLLLVSRRGADAPGSDELRAEIEDLGASAEIAACDTADRDALSALLDGLPRPLTGVVHAAGVLADGLVTSIDEPAVEQVLRAKVDAAWNLHELTANTGLSFFVLFSSAASVLAGPGQGVYAAANESLNALAALRRTRGLPAKALGWGLWAIGRAIAFAEQTGDAIAPEEGAYAFETLLRHNRAYSGYAPVIGSPWLTAFAQHSPFAEKFQSLGQNRSGTSKFLAELVDLPREEWPDRLRRLLELVRSHAAAVSGYGSADQLPERKAFKDLGFDSLAAVELRNRLGTATGVRLPSTLVFDHPTPLAVAEHLRDRLTSGEDNPIPLCQGDGEEMSTWLRRFGPPVEHRARLVCFPHAGAAADSYLDLARALAPEIDVHAVQYPGRQDRRDEEPLGTAGEIADEVAAVLRASGGDGPFALFGHSMGALIAYETARRLEREPGGGPLRLFVSGQTAPRVHERRTDLPGDDGLVDELRRLGTSEAALADEALLAMSLPVLRADYRVLRSYAWADGPPLRAGITALCGDADPLTATGDAERWLQHSVIPGRTRTFPGGHFYLGEQVTEVAGAVRRDLLRAGLAG

SEQ ID NO: 60 - protein, 3874 aa, Artificial Sequence
  MOS
MNPPCGPVRANCVHISIDFPMPVSKVSGPRSRTTSRRTPVRIGAVVVASSTSELLDGLAAVADGRPHASVVRGVARPSAPVVFVFPGQGAQWAGMAGELLGESRVFAAAMDACARAFEPVTDWTLAQVLDSPEQSRRVEVVQPALFAVQTSLAALWRSFGVTPDAVVGHSIGELAAAHVCGAAGAADAARAAALWSREMIPLVGNGDMAAVALSADEIEPRIARWDDDVVLAGVNGPRSVLLTGSPEPVARRVQELSAEGVRAQVINVSMAAHSAQVDDIAEGMRSALAWFAPGGSEVPFYASLTGGAVDTRELVADYWRRSFRLPVRFDEAIRSALEVGPGTFVEASPHPVLAAALQQTLDAEGSSAAVVPTLQRGQGGMRRFLLAAAQAFTGGVAVDWTAAYDDVGPNPALCRSSRRPRRKTSRPSPASTGTRHRTCCERLLAVVNGETAALAGREADAEATFRELGLDSVLAAQLRAKVSAAIGREVNIALLYDHPTPRALAEALAGLPQEIKHTPAVRTTSEDPIAIVSMACRLPGGVNTPQRLWELLREGGETLSGFPTDRGWDLARLHHPDPDNPGTSYVDKGGFLDDAAGFDAEFFGVSPREAAAMDPQQRLLLETSWELVENAGIDPHSLRGTATGVFLGVAKFGYGEDTAAAEDVEGYSVTGVAPAVASGRISYTMGLEGPSISVDTACSSSLVALHLAVESLRKGESSMAVVGGAAVMATPGVFVDFSRQRALAADGRSKAFGAGADGFGFSEGVTLVLLERLSEARRNGHEVLAVVRGSALNQDGASNGLSAPSGPAQRRVIRQALESCGLEPGDVDAVEAHGTGTALGDPIEANALLDTYGRDRDADRPLWLGSVKSNIGHTQAAAGVTGLLKVVLALRNGELPATLHVEEPTPHVDWSSGGVALLAGNQPWRRGERTRRAAVSAFGISGTNAHVIVEEAPQEVRPAPGQGLSPAVSTLVVAGKTMQRVSATAGMLADWMEGPGADVALADVAHTLNHHRSRQPKFGTVVARDRTQAIAGLRALAAGQHAPGVVNPAEGSPGPGTVFVFPGQGSQRAGMGEELAAAFPVFARIHQQVWDLLDVPDLDVNETGYAQPALFALQVALFGLLESWGVRPDAVVGHSVGELAAGYVSGLWSLEDACTLVSARARLMQALPAGGVMAAVPVSEDEARAVLGEGVEIAAVNGPSSVVLSGDEAAVLQAAEGLGKWTRLPTSHAFHSARMEPMLEEFRAVAEGLTYRTPQVAMAAGDQVMTAEYWVRQVRDTVRFGEQVASFEDAVFVELGADRSLARLVDGIAMLHGDHEAQAADHRQITEAVADAYVLGHLPDFAALRRPHARKLDLPTYPFERRQYWFRDARERPEQPRDTGGPRTEAVRLLEDGRIEELAALLGGASDDQHTLQVLTKLAAQHNQQRTTRSIADDRYEIRWDRSTSPLSGADVDQAGSWIVVSDDADAVPPLVDLLAARNEPHQVVGLPASDADEERLAETLRAAATEDATLRIVHVAALEAGATPSMRSLLRMQHRILGGTRRVFRAAVAAELRGPIWIVTRGAQRVADTDTVAPHQSCLWGFGRAASLELPHVWGGLADLSEGGDNAADEWSALVDRIAAPHGSAVREDQLALRDRAVYTPRLARRSAPPSGTPLHLRGDGTVLITGGTGTLGRLLARHLVTEHGVRHLLLVSRRGADAPGSDELRAEIEDLGASAEIAACDTADRDALSALLDGLPRPLTGVVHAAGVLADGLVTSIDEPAVEQVLRAKVDAAWNLHELTANTGLSFFVLFSSAASVLAGPGQGVYAAANESLNALAALRRTRGLPAKALGWGLWAIGRAIAFAEQTGDAIAPEEGAYAFETLLRHNRAYSGYAPVIGSPWLTAFAQHSPFAEKFQSLGQNRSGTSKFLAELVDLPREEWPDRLRRLLELVRSHAAAVSGYGSADQLPERKAFKDLGFDSLAAVELRNRLGTATGVRLPSTLVFDHPTPLAVAEHLRDRLLPVEQPFVHSPEERYRPFALTDVQQAYLVGRQPGFALGGVGSHFFVEFEIADLDIHRLEKVWNRLIARHDMLRAVVRDGQQRVLEQTPPWVIPAHILHSPEEALQVRDRLAHQVLNPEVWPVFDLQVGFVDGMPARLWLCLDNLLLDGLSMQILLSELEHGYRYPQQLPPPLPITFRDYLQQPALRTPNPDSLAWWQTQLDDIPPAPALPLRCLPQDVETPRFARLYGAMDSARWRRLKQRAADAHLTPSAVLLSVWSTVLAAWSAQPDFTLNLTLFDRRPLHPQINQILGDFTSLMLLSWHPGESWLQSARLLQQRLSESLNHRDVSAIRVMRQLARRQNVPAVPMPVVFTSALGFEQDNFLARRNLLKPVWGISQTPQVWLDHQVYESEGELRFNWDFVAALFPDGQVERQFAQYCALLNRMAEDDSSWQLPLADLVPPLKVTERRARRLRPERAQPRIAADKSSVSLICDTFREVVGEPVAPAENFFEAGATSLNLVQLHVLLQRHEFATLTLLDLFTHPSPVALANYLAGVALEEKTKRVRPVRRRQRRIQHLPLVAAQPGIWMAEKLSELPSAWSVAHYVELTGEVDSPLLARAVVAGLAQADTLRMRFTEDNGEVWQWVDDALTFELPEIIDLRTNIDPHGTAQALMQADLQQDLRVDSGKPLVFHQLIQVADNRWYWYQRYHHLLVDGFSFPAITRQIANIYCTWLRGEPTPASPFTPFADVVEEYQQYRESEAWQRDAAFWAEQRRQLPPPASLSPAPLPGRSASADILRLKLEFTDGEFRQLATQLSGVQRTDLALALAALWLGRLCNRMDYAAGFIFMRRLGSAALTATGPVLNVLPLGIHIGNPSFSELLTRVREVALGAYAHQHIPFEMLVEALQPERNLSHTPLFQVMFVLQNAPASQLELTGITANPIKVKSTTTKFDLTLIMQNTASGLVGVWEYNTDLFDASTIERMTGHFVTLLEGVIANPQQPISQLPILTTVEQQQLLVEWNNTQTDYPADKCIHQLFEEQVERTPDAVAVVFGNQQLSYREMREQVVALANLLRERGVKPGDSVAVALPRSVFLTLALHAIVEAGAAWLPLDTGYPDDRLKMMLEDARPSLLITTDDQLPRFSDVPNLTSLCYNAPLTPQGSAPLQLSQPHHTAYIIFTSGSTGRPKGVMVGQTAIVNRLLWMQNHYPLTGEDVVAQKTPCSFDVSVWEFFWPFIAGAKLVMAEPEAHRDPLAMQQFFAEYGVTTTHFVPSMLAAFVASLTPQTARQSCATLKQVFCSGEALPADLCREWQQLTGAPLHNLYGPTEAAVDVSWYPAFGEELAQVRGSSVPIGYPVWNTGLRILDAMMHPVPPGVAGDLYLTGIQLAQGYLGRPDLTASRFIADPFAPGERMYRTGDVARWLDNGAVEYLGRSDDQLKIRGQRIELGEIDRVMQALPDVEQAVASCAIAREDIPGNKHLVAYIVPQEEQTCTERSRSTLTVSFVRSFLKEKLPEYMVPSAIVILDALPLTPNGKLDRRALPAPDLHSQLETIIAAAFSSLLGCDVQDADADFFALGGHSLLAMKLAAQLSRQVARQVTPGQVMVASTVAKLATIIDAELDKYVAPRNPITSGEDNPIPLCQGDGEEMSTWLRRFGPPVEHRARLVCFPHAGAAADSYLDLARALAPEIDVHAVQYPGRQDRRDEEPLGTAGEIADEVAAVLRASGGDGPFALFGHSMGALIAYETARRLEREPGGGPLRLFVSGQTAPRVHERRTDLPGDDGLVDELRRLGTSEAALADEALLAMSLPVLRADYRVLRSYAWADGPPLRAGITALCGDADPLTATGDAERWLQHSVIPGRTRTFPGGHFYLGEQVTEVAGAVRRDLLRAGLAG

SEQ ID NO: 61 - protein, 3989 aa, Artificial Sequence
  MSC
MNPPCGPVRANCVHISIDFPMPVSKVSGPRSRTTSRRTPVRIGAVVVASSTSELLDGLAAVADGRPHASVVRGVARPSAPVVFVFPGQGAQWAGMAGELLGESRVFAAAMDACARAFEPVTDWTLAQVLDSPEQSRRVEVVQPALFAVQTSLAALWRSFGVTPDAVVGHSIGELAAAHVCGAAGAADAARAAALWSREMIPLVGNGDMAAVALSADEIEPRIARWDDDVVLAGVNGPRSVLLTGSPEPVARRVQELSAEGVRAQVINVSMAAHSAQVDDIAEGMRSALAWFAPGGSEVPFYASLTGGAVDTRELVADYWRRSFRLPVRFDEAIRSALEVGPGTFVEASPHPVLAAALQQTLDAEGSSAAVVPTLQRGQGGMRRFLLAAAQAFTGGVAVDWTAAYDDVGPNPALCRSSRRPRRKTSRPSPASTGTRHRTCCERLLAVVNGETAALAGREADAEATFRELGLDSVLAAQLRAKVSAAIGREVNIALLYDHPTPRALAEALAVPVEQPFVHSPEDRYQPFALTDVQQAYLVGRQPGFALGGVGSHFFVEFEIADLDLTRLETVWNRLIARHDMLRAIVRDGQQQVLEQTPPWVIPAHTLHTPEEALRVREKLAHQVLNPEVWPVFDLQVGYVDGMPARLWLCLDNLLLDGLSMQILLAELEHGYRYPQQLLPPLPVTFRDYLQQPSLQSPNPDSLAWWQAQLDDIPPAPALPLRCLPQEVETPRFARLNGALDSTRWHRLKKRAADAHLTPSAVLLSVWSTVLSAWSAQPEFTLNLTLFDRRPLHPQINQILGDFTSLMLLSWHPGESWLHSAQSLQQRLSQNLNHRDVSAIRVMRQLAQQQNVPAVPMPVVFTSALGFEQDNFLARRNLLKPVWGISQTPQVWLDHQIYESEGELRFNWDFVAALFPAGQVERQFEQYCALLNRMAEDESGWQLPLAALVPPVKHAGQCAERSPRVCPEQSQPHIAADESTVSLICDAFREVVGESVTPAENFFEAGATSLNLVQLHVLLQRHEFSTLTLLDLFTHPSPAALADYLAGVATVEKTKRPRPVRRRQRRIQHLPLVAAQPGIWMAEKLSELPSAWSVAHYVELTGEVDSPLLARAVVAGLAQADTLRMRFTEDNGEVWQWVDDALTFELPEIIDLRTNIDPHGTAQALMQADLQQDLRVDSGKPLVFHQLIQVADNRWYWYQRYHHLLVDGFSFPAITRQIANIYCTWLRGEPTPASPFTPFADVVEEYQQYRESEAWQRDAAFWAEQRRQLPPPASLSPAPLPGRSASADILRLKLEFTDGEFRQLATQLSGVQRTDLALALAALWLGRLCNRMDYAAGFIFMRRLGSAALTATGPVLNVLPLGIHIGNPSFSELLTRVREVALGAYAHQHIPFEMLVEALQPERNLSHTPLFQVMFVLQNAPASQLELTGITANPIKVKSTTTKFDLTLIMQNTASGLVGVWEYNTDLFDASTIERMTGHFVTLLEGVIANPQQPISQLPILTTVEQQQLLVEWNNTQTDYPADKCIHQLFEEQVERTPDAVAVVFGNQQLSYREMREQVVALANLLRERGVKPGDSVAVALPRSVFLTLALHAIVEAGAAWLPLDTGYPDDRLKMMLEDARPSLLITTDDQLPRFSDVPNLTSLCYNAPLTPQGSAPLQLSQPHHTAYIIFTSGSTGRPKGVMVGQTAIVNRLLWMQNHYPLTGEDVVAQKTPCSFDVSVWEFFWPFIAGAKLVMAEPEAHRDPLAMQQFFAEYGVTTTHFVPSMLAAFVASLTPQTARQSCATLKQVFCSGEALPADLCREWQQLTGAPLHNLYGPTEAAVDVSWYPAFGEELAQVRGSSVPIGYPVWNTGLRILDAMMHPVPPGVAGDLYLTGIQLAQGYLGRPDLTASRFIADPFAPGERMYRTGDVARWLDNGAVEYLGRSDDQLKIRGQRIELGEIDRVMQALPDVEQAVASCAIAREDIPGNKHLVAYIVPQEEQTCTERSRSTLTVSFVRSFLKEKLPEYMVPSAIVILDALPLTPNGKLDRRALPAPDLHSQLETIIAAAFSSLLGCDVQDADADFFALGGHSLLAMKLAAQLSRQVARQVTPGQVMVASTVAKLATIIDAELDKYVAPRNPILPVEQPFVHSPEERYRPFALTDVQQAYLVGRQPGFALGGVGSHFFVEFEIADLDIHRLEKVWNRLIARHDMLRAVVRDGQQRVLEQTPPWVIPAHILHSPEEALQVRDRLAHQVLNPEVWPVFDLQVGFVDGMPARLWLCLDNLLLDGLSMQILLSELEHGYRYPQQLPPPLPITFRDYLQQPALRTPNPDSLAWWQTQLDDIPPAPALPLRCLPQDVETPRFARLYGAMDSARWRRLKQRAADAHLTPSAVLLSVWSTVLAAWSAQPDFTLNLTLFDRRPLHPQINQILGDFTSLMLLSWHPGESWLQSARLLQQRLSESLNHRDVSAIRVMRQLARRQNVPAVPMPVVFTSALGFEQDNFLARRNLLKPVWGISQTPQVWLDHQVYESEGELRFNWDFVAALFPDGQVERQFAQYCALLNRMAEDDSSWQLPLADLVPPLKVTERRARRLRPERAQPRIAADKSSVSLICDTFREVVGEPVAPAENFFEAGATSLNLVQLHVLLQRHEFATLTLLDLFTHPSPVALANYLAGVALEEKTKRVRPVRRRQRRIGEPFPLAPMQHAMWVGRHDHQQLGGVAGHLYVEFDGARVDPDRLRAAATRLALRHPMLRVQFLPDGTQRIPPAAGSRDFPISVADLRHVAPDVVDQRLAGIRDAKSHQQLDGAVFELALTLLPGERTRLHVDLDMQAADAMSYRILLADLAALYDGREPPALGYTYREYRQAIEAEETLPQPVRDADRDWWAQRIPQLPDPPALPTRAGGERDRRRSTRRWHWLDPQTRDALFARARARGITPAMTLAAAFANVLARWSASSRFLLNLPLFSRQALHPDVDLLVGDFTSSLLLDVDLGDTVSNLARKNQLTFTEDWEHRHWSGVELLRELKRQQRYPHGAPVVFTSNLGRSLYSSRAESPLGEPEWGISQTPQVWIDHLAFEHHGEVWLQWDSNDALFPPALVETLFDAYCQLINQLCDDESAWQKPFADMMPASQRAIRERVNATGAPIPEGLLHEGIFRIALQQPQALAVTDMRYQWNSYREMREQVVALANLLRERGVKPGDSVAVALPRSVFLTLALHAIVEAGAAWLPLDTGYPDDRLKMMLEDARPSLLITTDDQLPRFSDVPNLTSLCYNAPLTPQGSAPLQLSQPHHTAYIIFTSGSTGRPKGVMVGQTAIVNRLLWMQNHYPLTGEDVVAQKTPCSFDVSVWEFFWPFIAGAKLVMAEPEAHRDPLAMQQFFAEYGVTTTHFVPSMLAAFVASLTPQTARQSCATLKQVFCSGEALPADLCREWQQLTGAPLHNLYGPTEAAVDVSWYPAFGEELAQVRGSSVPIGYPVWNTGLRILDAMMHPVPPGVAGDLYLTGIQLAQGYLGRPDLTASRFIADPFAPGERMYRTGDVARWLDNGAVEYLGRSDDQLKIRGQRIELGEIDRVMQALPDVEQAVASCAIAREDIPGNKHLVAYIVPQEEQTCTERSRSTLTVSFVRSFLKEKLPEYMVPSAIVILDALPLTPNGKLDRRALPAPDLHSQLLDKYVAPRNPIETIIAAAFSSLLGCDVQDADADFFALGGHSLLAMKLAAQLSRQVARQVTPGQVMVASTVAKLATIIDAETSGEDNPIPLCQGDGEEMSTWLRRFGPPVEHRARLVCFPHAGAAADSYLDLARALAPEIDVHAVQYPGRQDRRDEEPLGTAGEIADEVAAVLRASGGDGPFALFGHSMGALIAYETARRLEREPGGGPLRLFVSGQTAPRVHERRTDLPGDDGLVDELRRLGTSEAALADEALLAMSLPVLRADYRVLRSYAWADGPPLRAGITALCGDADPLTATGDAERWLQHSVIPGRTRTFPGGHFYLGEQVTEVAGAVRRDLLRAGLAG

SEQ ID NO: 62 - protein, 4430 aa, Artificial Sequence
  MSH
MNPPCGPVRANCVHISIDFPMPVSKVSGPRSRTTSRRTPVRIGAVVVASSTSELLDGLAAVADGRPHASVVRGVARPSAPVVFVFPGQGAQWAGMAGELLGESRVFAAAMDACARAFEPVTDWTLAQVLDSPEQSRRVEVVQPALFAVQTSLAALWRSFGVTPDAVVGHSIGELAAAHVCGAAGAADAARAAALWSREMIPLVGNGDMAAVALSADEIEPRIARWDDDVVLAGVNGPRSVLLTGSPEPVARRVQELSAEGVRAQVINVSMAAHSAQVDDIAEGMRSALAWFAPGGSEVPFYASLTGGAVDTRELVADYWRRSFRLPVRFDEAIRSALEVGPGTFVEASPHPVLAAALQQTLDAEGSSAAVVPTLQRGQGGMRRFLLAAAQAFTGGVAVDWTAAYDDVGPNPALCRSSRRPRRKTSRPSPASTGTRHRTCCERLLAVVNGETAALAGREADAEATFRELGLDSVLAAQLRAKVSAAIGREVNIALLYDHPTPRALAEALAVPVEQPFVHSPEDRYQPFALTDVQQAYLVGRQPGFALGGVGSHFFVEFEIADLDLTRLETVWNRLIARHDMLRAIVRDGQQQVLEQTPPWVIPAHTLHTPEEALRVREKLAHQVLNPEVWPVFDLQVGYVDGMPARLWLCLDNLLLDGLSMQILLAELEHGYRYPQQLLPPLPVTFRDYLQQPSLQSPNPDSLAWWQAQLDDIPPAPALPLRCLPQEVETPRFARLNGALDSTRWHRLKKRAADAHLTPSAVLLSVWSTVLSAWSAQPEFTLNLTLFDRRPLHPQINQILGDFTSLMLLSWHPGESWLHSAQSLQQRLSQNLNHRDVSAIRVMRQLAQQQNVPAVPMPVVFTSALGFEQDNFLARRNLLKPVWGISQTPQVWLDHQIYESEGELRFNWDFVAALFPAGQVERQFEQYCALLNRMAEDESGWQLPLAALVPPVKHAGQCAERSPRVCPEQSQPHIAADESTVSLICDAFREVVGESVTPAENFFEAGATSLNLVQLHVLLQRHEFSTLTLLDLFTHPSPAALADYLAGVATVEKTKRPRPVRRRQRRIQHLPLVAAQPGIWMAEKLSELPSAWSVAHYVELTGEVDSPLLARAVVAGLAQADTLRMRFTEDNGEVWQWVDDALTFELPEIIDLRTNIDPHGTAQALMQADLQQDLRVDSGKPLVFHQLIQVADNRWYWYQRYHHLLVDGFSFPAITRQIANIYCTWLRGEPTPASPFTPFADVVEEYQQYRESEAWQRDAAFWAEQRRQLPPPASLSPAPLPGRSASADILRLKLEFTDGEFRQLATQLSGVQRTDLALALAALWLGRLCNRMDYAAGFIFMRRLGSAALTATGPVLNVLPLGIHIGNPSFSELLTRVREVALGAYAHQHIPFEMLVEALQPERNLSHTPLFQVMFVLQNAPASQLELTGITANPIKVKSTTTKFDLTLIMQNTASGLVGVWEYNTDLFDASTIERMTGHFVTLLEGVIANPQQPISQLPILTTVEQQQLLVEWNNTQTDYPADKCIHQLFEEQVERTPDAVAVVFGNQQLSYREMREQVVALANLLRERGVKPGDSVAVALPRSVFLTLALHAIVEAGAAWLPLDTGYPDDRLKMMLEDARPSLLITTDDQLPRFSDVPNLTSLCYNAPLTPQGSAPLQLSQPHHTAYIIFTSGSTGRPKGVMVGQTAIVNRLLWMQNHYPLTGEDVVAQKTPCSFDVSVWEFFWPFIAGAKLVMAEPEAHRDPLAMQQFFAEYGVTTTHFVPSMLAAFVASLTPQTARQSCATLKQVFCSGEALPADLCREWQQLTGAPLHNLYGPTEAAVDVSWYPAFGEELAQVRGSSVPIGYPVWNTGLRILDAMMHPVPPGVAGDLYLTGIQLAQGYLGRPDLTASRFIADPFAPGERMYRTGDVARWLDNGAVEYLGRSDDQLKIRGQRIELGEIDRVMQALPDVEQAVASCAIAREDIPGNKHLVAYIVPQEEQTCTERSRSTLTVSFVRSFLKEKLPEYMVPSAIVILDALPLTPNGKLDRRALPAPDLHSQLETIIAAAFSSLLGCDVQDADADFFALGGHSLLAMKLAAQLSRQVARQVTPGQVMVASTVAKLATIIDAELDKYVAPRNPIPGIGALVPAPVVIAAGRTEEPIAIVSMACRLPGGVNTPQRLWELLREGGETLSGFPTDRGWDLARLHHPDPDNPGTSYVDKGGFLDDAAGFDAEFFGVSPREAAAMDPQQRLLLETSWELVENAGIDPHSLRGTATGVFLGVAKFGYGEDTAAAEDVEGYSVTGVAPAVASGRISYTMGLEGPSISVDTACSSSLVALHLAVESLRKGESSMAVVGGAAVMATPGVFVDFSRQRALAADGRSKAFGAGADGFGFSEGVTLVLLERLSEARRNGHEVLAVVRGSALNQDGASNGLSAPSGPAQRRVIRQALESCGLEPGDVDAVEAHGTGTALGDPIEANALLDTYGRDRDADRPLWLGSVKSNIGHTQAAAGVTGLLKVVLALRNGELPATLHVEEPTPHVDWSSGGVALLAGNQPWRRGERTRRAAVSAFGISGTNAHVIVEEAPQEVRPAPGQGLSPAVSTLVVAGKTMQRVSATAGMLADWMEGPGADVALADVAHTLNHHRSRQPKFGTVVARDRTQAIAGLRALAAGQHAPGVVNPAEGSPGPGTVFVFPGQGSQRAGMGEELAAAFPVFARIHQQVWDLLDVPDLDVNETGYAQPALFALQVALFGLLESWGVRPDAVVGHSVGELAAGYVSGLWSLEDACTLVSARARLMQALPAGGVMAAVPVSEDEARAVLGEGVEIAAVNGPSSVVLSGDEAAVLQAAEGLGKWTRLPTSHAFHSARMEPMLEEFRAVAEGLTYRTPQVAMAAGDQVMTAEYWVRQVRDTVRFGEQVASFEDAVFVELGADRSLARLVDGIAMLHGDHEAQAGMRREQPLPLGLRRLLTDLHNAGAAVDFSVLCPQGRLVDAPLPAWSHRFLFYDREGVDNRSPGGSTVAVHPLLLAAVDVPGHGGAVFTGRLSTDEQPWLAEHVVGGRTLVPGSVLVDLALAAGEDVGLPVLEELVLQRPLVLAGAGALLRMSVGAPDESGRRTIDVHAAEDVADLADAQWSQHATGTLAQGVAAGPRDTEQWPPEDAVRIPLDDHYDGLAEQGYEYGPSFQALVAYVAEDATATMLAEVALPGSIRSQQGLYAIHPALLDACFQSVGAHPDSQSVGSGLLVPLGVRRVRAYAPVRTARYCYTRVTKVELAGVEADIDVLDAHGTVLLAVCGLRIGTGVSERDKHNRVLNERLLTIEWHQRELPEMDPSGAGKWLLISDCAASDVTATRLADAFREHSAACTTMRWPLHDDQLAAADQLRDQVGSDEFSGVVVLTGPNTGTPHQGSADRGAEYVRRLVGIARELSDLPGAVPRMYVVTRGAQRVLADDCVNLEQGGLRGLLRTIGAEHPHLRATQIDVDEQTGVEQLARQLLATSEEDETAWRDNEWYVARLCPTPLRPQERRTIVADHQQSGMRLQIRTPGAIDSVAFEPAPDVEQPLRAGEVRVDVRATGVNFRDVLLALGMYPQKADMGTEAAGVVTAVGPDVDAFAPGDRVLGLFQGAFAPIAVTDHRLLARVPDGWSDADAAAVPIAYTTAHYALHDLAGLRAGQSVLIHAAAGGVGMAAVALARRAGAEVLATAGPAKHGTLRALGLDDEHIASSRETGFARKFRERTGGRGVDVVLNSLTGELLDESADLLAEDGVFVEMGKTDLRDAGDFRGRYAPFDLGEAGDDRLGEILREVVGLLGAGELDRLPVSAWELGIPQTGKSLVTLPPEQAQVFRPDGTVLITGGTGTLGRLLARHLVTEHGVRHLLLVSRRGADAPGSDELRAEIEDLGASAEIAACDTADRDALSALLDGLPRPLTGVVHAAGVLADGLVTSIDEPAVEQVLRAKVDAAWNLHELTANTGLSFFVLFSSAASVLAGPGQGVYAAANESLNALAALRRTRGLPAKALGWGLWAIGRAIAFAEQTGDAIAPEEGAYAFETLLRHNRAYSGYAPVIGSPWLTAFAQHSPFAEKFQSLGQNRSGTSKFLAELVDLPREEWPDRLRRLLELVRSHAAAVSGYGSADQLPERKAFKDLGFDSLAAVELRNRLGTATGVRLPSTLVFDHPTPLAVAEHLRDRLTSGEDNPIPLCQGDGEEMSTWLRRFGPPVEHRARLVCFPHAGAAADSYLDLARALAPEIDVHAVQYPGRQDRRDEEPLGTAGEIADEVAAVLRASGGDGPFALFGHSMGALIAYETARRLEREPGGGPLRLFVSGQTAPRVHERRTDLPGDDGLVDELRRLGTSEAALADEALLAMSLPVLRADYRVLRSYAWADGPPLRAGITALCGDADPLTATGDAERWLQHSVIPGRTRTFPGGHFYLGEQVTEVAGAVRRDLLRAGLAG

SEQ ID NO: 63 - protein, 3879 aa, Artificial Sequence
  MSO
MNPPCGPVRANCVHISIDFPMPVSKVSGPRSRTTSRRTPVRIGAVVVASSTSELLDGLAAVADGRPHASVVRGVARPSAPVVFVFPGQGAQWAGMAGELLGESRVFAAAMDACARAFEPVTDWTLAQVLDSPEQSRRVEVVQPALFAVQTSLAALWRSFGVTPDAVVGHSIGELAAAHVCGAAGAADAARAAALWSREMIPLVGNGDMAAVALSADEIEPRIARWDDDVVLAGVNGPRSVLLTGSPEPVARRVQELSAEGVRAQVINVSMAAHSAQVDDIAEGMRSALAWFAPGGSEVPFYASLTGGAVDTRELVADYWRRSFRLPVRFDEAIRSALEVGPGTFVEASPHPVLAAALQQTLDAEGSSAAVVPTLQRGQGGMRRFLLAAAQAFTGGVAVDWTAAYDDVGPNPALCRSSRRPRRKTSRPSPASTGTRHRTCCERLLAVVNGETAALAGREADAEATFRELGLDSVLAAQLRAKVSAAIGREVNIALLYDHPTPRALAEALAVPVEQPFVHSPEDRYQPFALTDVQQAYLVGRQPGFALGGVGSHFFVEFEIADLDLTRLETVWNRLIARHDMLRAIVRDGQQQVLEQTPPWVIPAHTLHTPEEALRVREKLAHQVLNPEVWPVFDLQVGYVDGMPARLWLCLDNLLLDGLSMQILLAELEHGYRYPQQLLPPLPVTFRDYLQQPSLQSPNPDSLAWWQAQLDDIPPAPALPLRCLPQEVETPRFARLNGALDSTRWHRLKKRAADAHLTPSAVLLSVWSTVLSAWSAQPEFTLNLTLFDRRPLHPQINQILGDFTSLMLLSWHPGESWLHSAQSLQQRLSQNLNHRDVSAIRVMRQLAQQQNVPAVPMPVVFTSALGFEQDNFLARRNLLKPVWGISQTPQVWLDHQIYESEGELRFNWDFVAALFPAGQVERQFEQYCALLNRMAEDESGWQLPLAALVPPVKHAGQCAERSPRVCPEQSQPHIAADESTVSLICDAFREVVGESVTPAENFFEAGATSLNLVQLHVLLQRHEFSTLTLLDLFTHPSPAALADYLAGVATVEKTKRPRPVRRRQRRIQHLPLVAAQPGIWMAEKLSELPSAWSVAHYVELTGEVDSPLLARAVVAGLAQADTLRMRFTEDNGEVWQWVDDALTFELPEIIDLRTNIDPHGTAQALMQADLQQDLRVDSGKPLVFHQLIQVADNRWYWYQRYHHLLVDGFSFPAITRQIANIYCTWLRGEPTPASPFTPFADVVEEYQQYRESEAWQRDAAFWAEQRRQLPPPASLSPAPLPGRSASADILRLKLEFTDGEFRQLATQLSGVQRTDLALALAALWLGRLCNRMDYAAGFIFMRRLGSAALTATGPVLNVLPLGIHIGNPSFSELLTRVREVALGAYAHQHIPFEMLVEALQPERNLSHTPLFQVMFVLQNAPASQLELTGITANPIKVKSTTTKFDLTLIMQNTASGLVGVWEYNTDLFDASTIERMTGHFVTLLEGVIANPQQPISQLPILTTVEQQQLLVEWNNTQTDYPADKCIHQLFEEQVERTPDAVAVVFGNQQLSYREMREQVVALANLLRERGVKPGDSVAVALPRSVFLTLALHAIVEAGAAWLPLDTGYPDDRLKMMLEDARPSLLITTDDQLPRFSDVPNLTSLCYNAPLTPQGSAPLQLSQPHHTAYIIFTSGSTGRPKGVMVGQTAIVNRLLWMQNHYPLTGEDVVAQKTPCSFDVSVWEFFWPFIAGAKLVMAEPEAHRDPLAMQQFFAEYGVTTTHFVPSMLAAFVASLTPQTARQSCATLKQVFCSGEALPADLCREWQQLTGAPLHNLYGPTEAAVDVSWYPAFGEELAQVRGSSVPIGYPVWNTGLRILDAMMHPVPPGVAGDLYLTGIQLAQGYLGRPDLTASRFIADPFAPGERMYRTGDVARWLDNGAVEYLGRSDDQLKIRGQRIELGEIDRVMQALPDVEQAVASCAIAREDIPGNKHLVAYIVPQEEQTCTERSRSTLTVSFVRSFLKEKLPEYMVPSAIVILDALPLTPNGKLDRRALPAPDLHSQLETIIAAAFSSLLGCDVQDADADFFALGGHSLLAMKLAAQLSRQVARQVTPGQVMVASTVAKLATIIDAELDKYVAPRNPIPGIGALVPAPVVIAAGRTEEPIAIVSMACRLPGGVNTPQRLWELLREGGETLSGFPTDRGWDLARLHHPDPDNPGTSYVDKGGFLDDAAGFDAEFFGVSPREAAAMDPQQRLLLETSWELVENAGIDPHSLRGTATGVFLGVAKFGYGEDTAAAEDVEGYSVTGVAPAVASGRISYTMGLEGPSISVDTACSSSLVALHLAVESLRKGESSMAVVGGAAVMATPGVFVDFSRQRALAADGRSKAFGAGADGFGFSEGVTLVLLERLSEARRNGHEVLAVVRGSALNQDGASNGLSAPSGPAQRRVIRQALESCGLEPGDVDAVEAHGTGTALGDPIEANALLDTYGRDRDADRPLWLGSVKSNIGHTQAAAGVTGLLKVVLALRNGELPATLHVEEPTPHVDWSSGGVALLAGNQPWRRGERTRRAAVSAFGISGTNAHVIVEEAPQEVRPAPGQGLSPAVSTLVVAGKTMQRVSATAGMLADWMEGPGADVALADVAHTLNHHRSRQPKFGTVVARDRTQAIAGLRALAAGQHAPGVVNPAEGSPGPGTVFVFPGQGSQRAGMGEELAAAFPVFARIHQQVWDLLDVPDLDVNETGYAQPALFALQVALFGLLESWGVRPDAVVGHSVGELAAGYVSGLWSLEDACTLVSARARLMQALPAGGVMAAVPVSEDEARAVLGEGVEIAAVNGPSSVVLSGDEAAVLQAAEGLGKWTRLPTSHAFHSARMEPMLEEFRAVAEGLTYRTPQVAMAAGDQVMTAEYWVRQVRDTVRFGEQVASFEDAVFVELGADRSLARLVDGIAMLHGDHEAQAADHRQITEAVADAYVLGHLPDFAALRRPHARKLDLPTYPFERRQYWFRDARERPEQPRDTGGPRTEAVRLLEDGRIEELAALLGGASDDQHTLQVLTKLAAQHNQQRTTRSIADDRYEIRWDRSTSPLSGADVDQAGSWIVVSDDADAVPPLVDLLAARNEPHQVVGLPASDADEERLAETLRAAATEDATLRIVHVAALEAGATPSMRSLLRMQHRILGGTRRVFRAAVAAELRGPIWIVTRGAQRVADTDTVAPHQSCLWGFGRAASLELPHVWGGLADLSEGGDNAADEWSALVDRIAAPHGSAVREDQLALRDRAVYTPRLARRSAPPSGTPLHLRGDGTVLITGGTGTLGRLLARHLVTEHGVRHLLLVSRRGADAPGSDELRAEIEDLGASAEIAACDTADRDALSALLDGLPRPLTGVVHAAGVLADGLVTSIDEPAVEQVLRAKVDAAWNLHELTANTGLSFFVLFSSAASVLAGPGQGVYAAANESLNALAALRRTRGLPAKALGWGLWAIGRAIAFAEQTGDAIAPEEGAYAFETLLRHNRAYSGYAPVIGSPWLTAFAQHSPFAEKFQSLGQNRSGTSKFLAELVDLPREEWPDRLRRLLELVRSHAAAVSGYGSADQLPERKAFKDLGFDSLAAVELRNRLGTATGVRLPSTLVFDHPTPLAVAEHLRDRLTSGEDNPIPLCQGDGEEMSTWLRRFGPPVEHRARLVCFPHAGAAADSYLDLARALAPEIDVHAVQYPGRQDRRDEEPLGTAGEIADEVAAVLRASGGDGPFALFGHSMGALIAYETARRLEREPGGGPLRLFVSGQTAPRVHERRTDLPGDDGLVDELRRLGTSEAALADEALLAMSLPVLRADYRVLRSYAWADGPPLRAGITALCGDADPLTATGDAERWLQHSVIPGRTRTFPGGHFYLGEQVTEVAGAVRRDLLRAGLAG

SEQ ID NO: 64 - protein, 3992 aa, Artificial Sequence
  MSS
MNPPCGPVRANCVHISIDFPMPVSKVSGPRSRTTSRRTPVRIGAVVVASSTSELLDGLAAVADGRPHASVVRGVARPSAPVVFVFPGQGAQWAGMAGELLGESRVFAAAMDACARAFEPVTDWTLAQVLDSPEQSRRVEVVQPALFAVQTSLAALWRSFGVTPDAVVGHSIGELAAAHVCGAAGAADAARAAALWSREMIPLVGNGDMAAVALSADEIEPRIARWDDDVVLAGVNGPRSVLLTGSPEPVARRVQELSAEGVRAQVINVSMAAHSAQVDDIAEGMRSALAWFAPGGSEVPFYASLTGGAVDTRELVADYWRRSFRLPVRFDEAIRSALEVGPGTFVEASPHPVLAAALQQTLDAEGSSAAVVPTLQRGQGGMRRFLLAAAQAFTGGVAVDWTAAYDDVGPNPALCRSSRRPRRKTSRPSPASTGTRHRTCCERLLAVVNGETAALAGREADAEATFRELGLDSVLAAQLRAKVSAAIGREVNIALLYDHPTPRALAEALAVPVEQPFVHSPEDRYQPFALTDVQQAYLVGRQPGFALGGVGSHFFVEFEIADLDLTRLETVWNRLIARHDMLRAIVRDGQQQVLEQTPPWVIPAHTLHTPEEALRVREKLAHQVLNPEVWPVFDLQVGYVDGMPARLWLCLDNLLLDGLSMQILLAELEHGYRYPQQLLPPLPVTFRDYLQQPSLQSPNPDSLAWWQAQLDDIPPAPALPLRCLPQEVETPRFARLNGALDSTRWHRLKKRAADAHLTPSAVLLSVWSTVLSAWSAQPEFTLNLTLFDRRPLHPQINQILGDFTSLMLLSWHPGESWLHSAQSLQQRLSQNLNHRDVSAIRVMRQLAQQQNVPAVPMPVVFTSALGFEQDNFLARRNLLKPVWGISQTPQVWLDHQIYESEGELRFNWDFVAALFPAGQVERQFEQYCALLNRMAEDESGWQLPLAALVPPVKHAGQCAERSPRVCPEQSQPHIAADESTVSLICDAFREVVGESVTPAENFFEAGATSLNLVQLHVLLQRHEFSTLTLLDLFTHPSPAALADYLAGVATVEKTKRPRPVRRRQRRIQHLPLVAAQPGIWMAEKLSELPSAWSVAHYVELTGEVDSPLLARAVVAGLAQADTLRMRFTEDNGEVWQWVDDALTFELPEIIDLRTNIDPHGTAQALMQADLQQDLRVDSGKPLVFHQLIQVADNRWYWYQRYHHLLVDGFSFPAITRQIANIYCTWLRGEPTPASPFTPFADVVEEYQQYRESEAWQRDAAFWAEQRRQLPPPASLSPAPLPGRSASADILRLKLEFTDGEFRQLATQLSGVQRTDLALALAALWLGRLCNRMDYAAGFIFMRRLGSAALTATGPVLNVLPLGIHIGNPSFSELLTRVREVALGAYAHQHIPFEMLVEALQPERNLSHTPLFQVMFVLQNAPASQLELTGITANPIKVKSTTTKFDLTLIMQNTASGLVGVWEYNTDLFDASTIERMTGHFVTLLEGVIANPQQPISQLPILTTVEQQQLLVEWNNTQTDYPADKCIHQLFEEQVERTPDAVAVVFGNQQLSYREMREQVVALANLLRERGVKPGDSVAVALPRSVFLTLALHAIVEAGAAWLPLDTGYPDDRLKMMLEDARPSLLITTDDQLPRFSDVPNLTSLCYNAPLTPQGSAPLQLSQPHHTAYIIFTSGSTGRPKGVMVGQTAIVNRLLWMQNHYPLTGEDVVAQKTPCSFDVSVWEFFWPFIAGAKLVMAEPEAHRDPLAMQQFFAEYGVTTTHFVPSMLAAFVASLTPQTARQSCATLKQVFCSGEALPADLCREWQQLTGAPLHNLYGPTEAAVDVSWYPAFGEELAQVRGSSVPIGYPVWNTGLRILDAMMHPVPPGVAGDLYLTGIQLAQGYLGRPDLTASRFIADPFAPGERMYRTGDVARWLDNGAVEYLGRSDDQLKIRGQRIELGEIDRVMQALPDVEQAVASCAIAREDIPGNKHLVAYIVPQEEQTCTERSRSTLTVSFVRSFLKEKLPEYMVPSAIVILDALPLTPNGKLDRRALPAPDLHSQLETIIAAAFSSLLGCDVQDADADFFALGGHSLLAMKLAAQLSRQVARQVTPGQVMVASTVAKLATIIDAELDKYVAPRNPILPVEQPFVHSPEERYRPFALTDVQQAYLVGRQPGFALGGVGSHFFVEFEIADLDIHRLEKVWNRLIARHDMLRAVVRDGQQRVLEQTPPWVIPAHILHSPEEALQVRDRLAHQVLNPEVWPVFDLQVGFVDGMPARLWLCLDNLLLDGLSMQILLSELEHGYRYPQQLPPPLPITFRDYLQQPALRTPNPDSLAWWQTQLDDIPPAPALPLRCLPQDVETPRFARLYGAMDSARWRRLKQRAADAHLTPSAVLLSVWSTVLAAWSAQPDFTLNLTLFDRRPLHPQINQILGDFTSLMLLSWHPGESWLQSARLLQQRLSESLNHRDVSAIRVMRQLARRQNVPAVPMPVVFTSALGFEQDNFLARRNLLKPVWGISQTPQVWLDHQVYESEGELRFNWDFVAALFPDGQVERQFAQYCALLNRMAEDDSSWQLPLADLVPPLKVTERRARRLRPERAQPRIAADKSSVSLICDTFREVVGEPVAPAENFFEAGATSLNLVQLHVLLQRHEFATLTLLDLFTHPSPVALANYLAGVALEEKTKRVRPVRRRQRRIQHLPLVAAQPGIWMAEKLSELPSAWSVAHYVELTGEVDSPLLARAVVAGLAQADTLRMRFTEDNGEVWQWVDDALTFELPEIIDLRTNIDPHGTAQALMQADLQQDLRVDSGKPLVFHQLIQVADNRWYWYQRYHHLLVDGFSFPAITRQIANIYCTWLRGEPTPASPFTPFADVVEEYQQYRESEAWQRDAAFWAEQRRQLPPPASLSPAPLPGRSASADILRLKLEFTDGEFRQLATQLSGVQRTDLALALAALWLGRLCNRMDYAAGFIFMRRLGSAALTATGPVLNVLPLGIHIGNPSFSELLTRVREVALGAYAHQHIPFEMLVEALQPERNLSHTPLFQVMFVLQNAPASQLELTGITANPIKVKSTTTKFDLTLIMQNTASGLVGVWEYNTDLFDASTIERMTGHFVTLLEGVIANPQQPISQLPILTTVEQQQLLVEWNNTQTDYPADKCIHQLFEEQVERTPDAVAVVFGNQQLSYREMREQVVALANLLRERGVKPGDSVAVALPRSVFLTLALHAIVEAGAAWLPLDTGYPDDRLKMMLEDARPSLLITTDDQLPRFSDVPNLTSLCYNAPLTPQGSAPLQLSQPHHTAYIIFTSGSTGRPKGVMVGQTAIVNRLLWMQNHYPLTGEDVVAQKTPCSFDVSVWEFFWPFIAGAKLVMAEPEAHRDPLAMQQFFAEYGVTTTHFVPSMLAAFVASLTPQTARQSCATLKQVFCSGEALPADLCREWQQLTGAPLHNLYGPTEAAVDVSWYPAFGEELAQVRGSSVPIGYPVWNTGLRILDAMMHPVPPGVAGDLYLTGIQLAQGYLGRPDLTASRFIADPFAPGERMYRTGDVARWLDNGAVEYLGRSDDQLKIRGQRIELGEIDRVMQALPDVEQAVASCAIAREDIPGNKHLVAYIVPQEEQTCTERSRSTLTVSFVRSFLKEKLPEYMVPSAIVILDALPLTPNGKLDRRALPAPDLHSQLETIIAAAFSSLLGCDVQDADADFFALGGHSLLAMKLAAQLSRQVARQVTPGQVMVASTVAKLATIIDAELDKYVAPRNPITSGEDNPIPLCQGDGEEMSTWLRRFGPPVEHRARLVCFPHAGAAADSYLDLARALAPEIDVHAVQYPGRQDRRDEEPLGTAGEIADEVAAVLRASGGDGPFALFGHSMGALIAYETARRLEREPGGGPLRLFVSGQTAPRVHERRTDLPGDDGLVDELRRLGTSEAALADEALLAMSLPVLRADYRVLRSYAWADGPPLRAGITALCGDADPLTATGDAERWLQHSVIPGRTRTFPGGHFYLGEQVTEVAGAVRRDLLRAGLAG

SEQ ID NO: 65 - protein, 46 aa, Artificial Sequence
  Artificial sequence
DLAKHGTEDINVWRDSGFBASBVTLVIDNVDNVARBDFHKBGALWI

SEQ ID NO: 66 - DNA, 46 bp, Artificial Sequence
  Artificial sequence
cgatcagtcagtcgatcgaatcgactgatccacgactgcatcgaca

SEQ ID NO: 67 - protein, 25 aa, Artificial Sequence
  Exemplary linker
AWSNISKSFATFPYYRVSDNLLSKK

SEQ ID NO: 68 - protein, 10 aa, Artificial Sequence
  Artificial sequence
NHICMFVREY

SEQ ID NO: 69 - DNA, 21 bp, Artificial Sequence
  Artificial construct
acggtattgcagcagcttcat

SEQ ID NO: 70 - protein, 437 aa, Artificial Sequence
  ACP Condensation
AAIRSNVDPTGPTPLTPIQLWFFQQELPEPSLFTQSVLLEVPANTDAERLSTALLQLCECHAALRLRFHRAKDGWQQFIPAATVPPDFETHTLATPSEMEQLTQAAEARIDIVHGPLLAARLFTFSDGSPSRLFFTIHHLAVDGVSWRILLEDLYRAYHQQPLAPPATSFREWSLHLRDVAKSPSLADEVSFWQQVPSCNLWPTQEKNLVSEEASCSFELDEHATAALLRQAPRTYNASIQELLVAALAQGVASTTGHSRVTLDVERHGRHASDPQTDLSRTVGWFTTIYPVSVSVAVSASIRDSVPSVREQLRRIPEEGFHYPILRYLAAPNAFRDSQPSPILFNYHGQIDTALQQTVEWKPASEIVTPLRSLRARRSHLFEIISAVSNNRLQVEWHYNSRLQERSAIEALASNFQQQLIALCHPPIHLQSSPAIV

SEQ ID NO: 71 - protein, 17 aa, Artificial Sequence
  ACP Heterocyclization
EEALNIDGLAVVHDPED

SEQ ID NO: 72 - DNA, 57 bp, Artificial Sequence
  ACP-KS
ggtctgccgcaagaaataaaacacacgccggccgttcgtacgacgagcgaagacccg

SEQ ID NO: 73 - protein, 18 aa, Artificial Sequence
  ACP-KS
LGTDSKLPGGRRGTSDEP

SEQ ID NO: 74 - protein, 19 aa, Artificial Sequence
  ACP-KS
GLPQEIKHTPAVRTTSEDP

SEQ ID NO: 75 - DNA, 51 bp, Artificial Sequence
  ACP-TE
acgtcgggtgaagacaatccaatcccgttatgtcagggtgacggtgaagag

SEQ ID NO: 76 - protein, 73 aa, Artificial Sequence
  ACP-TE
VDTTAAETGGDTLSALFRSGLEAGAVGEAYDLLRSVVRLRPRFRTVDEVGDLAPAVTLRESDSELPRLICLST

SEQ ID NO: 77 - protein, 17 aa, Artificial Sequence
  ACP-TE
TSGEDNPIPLCQGDGEE

SEQ ID NO: 78 - protein, 83 aa, Artificial Sequence
  A-PCP
PVQVNNQTQLSAYCQTDKTLEIAEIREFLAKFLPVYMIPSYFIFLKQFPLTRHGKLDLHSLRELKETSKSLVNSNYVAPRNHL

SEQ ID NO: 79 - protein, 109 aa, Artificial Sequence
  AT-ACP
KAAAPARAAKPAATPESLPFVLSAFTVPALRAQADKLHLHMGMNIQDRFLDVAYSLATTRTHFRKRLVVFAKGKSDLLDALASYGRTGEVPAGAVSMVDDRDRECRLAL

SEQ ID NO: 80 - DNA, 207 bp, Artificial Sequence
  AT-DH
gggatgcgtcgtgaacaaccactgccgttaggtctgcgtcgtttactgacggatctgcacaatgcaggggccgccgttgacttctcggttctgtgtccgcaagggcgtctggttgacgccccgttaccggcctggagccaccggttcctgttctacgatcgtgagggtgttgacaatcgttcgccaggtggtagcacggttgccgtt

SEQ ID NO: 81 - protein, 66 aa, Artificial Sequence
  AT-DH
AKDETQTMQKGLAELHVLGAPVDWRGFFAPYGGERVKLPTYAFQRERYWLEPMPTRAVGAGLNDAN

SEQ ID NO: 82 - protein, 69 aa, Artificial Sequence
  AT-DH
GMRREQPLPLGLRRLLTDLHNAGAAVDFSVLCPQGRLVDAPLPAWSHRFLFYDREGVDNRSPGGSTVAV

SEQ ID NO: 83 - DNA, 1026 bp, Artificial Sequence
  AT-KR
gccgatcaccggcagatcacggaagcagttgccgacgcctacgttctggggcacctgccagatttcgccgccctgcggcgtccgcacgcccgtaagctggacctgccaacctacccgttcgagcgtcggcagtactggttccgtgatgcacgtgagcgtccagaacagccacgtgatacgggtgggccgcgtacggaggccgttcgtctgttagaagatgggcgtatcgaagagctggcagccttactgggtggtgccagcgacgaccagcacacgttacaggttctgaccaagctggccgcccagcacaatcaacaacgtacgacgcgttcgatagccgatgatcgttacgaaatccggtgggatcgtagcacgagcccactgagcggggccgacgttgaccaggccggttcgtggatcgttgttagcgacgacgccgacgccgttccgccactggttgatttactggccgcccgtaatgagccgcaccaagttgttggtttaccggccagcgacgccgatgaggaacggctggccgaaacgctgcgggccgccgccaccgaagacgccaccttacgtatcgttcacgttgccgccctggaggccggtgccacgccgtcgatgcggagcctgctgcggatgcagcaccgtatcctggggggtacgcgtcgtgttttccgggccgccgttgccgccgaactgcggggtccgatctggatcgttacccggggtgcccagcgtgttgcagatacggacaccgttgcaccacaccagagctgtttatggggtttcggtcgtgcagcctcgctggagctgccacacgtttggggtggtctggcagacctgtcggagggtggtgataatgcagcagacgaatggtcggcactggttgaccggatcgccgccccgcacggtagcgcagttcgggaagatcagttagccctgcgtgatcgggccgtttacaccccgcgtttagcccgtcgtagcgcaccaccgagcgggaccccgttacacctgcgtggtgac

SEQ ID NO: 84 - protein, 300 aa, Artificial Sequence
  AT-KR
AHPQQRDRDAQQLAQALAGLWTAGVEIDWPATRGGARRRNVPLPTYPFQRQRFWVEAGAPRPQDDASAAQPQGLYYLPAWVVQRSGAVPPAAGPGPGDTVLLLGGAGLPLAERLARRLAERGARVVKVAAAEGFRDDGGGGFALRPEERADHAALWRALGPTHAFHCWGLEEDWEQGYFSLLALVQGREDAGRDGPLSLTIVIDRAEEVAGNEPLEPGRATVAALARVLGQEMPRIACRDVLVPNAGSAAEAQLAEALAGEPARPVDEFCVAWRGAQRWVKTYEPVPAPAACAQRLRQGS

SEQ ID NO: 85 - protein, 342 aa, Artificial Sequence
  AT-KR
ADHRQITEAVADAYVLGHLPDFAALRRPHARKLDLPTYPFERRQYWFRDARERPEQPRDTGGPRTEAVRLLEDGRIEELAALLGGASDDQHTLQVLTKLAAQHNQQRTTRSIADDRYEIRWDRSTSPLSGADVDQAGSWIVVSDDADAVPPLVDLLAARNEPHQVVGLPASDADEERLAETLRAAATEDATLRIVHVAALEAGATPSMRSLLRMQHRILGGTRRVFRAAVAAELRGPIWIVTRGAQRVADTDTVAPHQSCLWGFGRAASLELPHVWGGLADLSEGGDNAADEWSALVDRIAAPHGSAVREDQLALRDRAVYTPRLARRSAPPSGTPLHLRGD

SEQ ID NO: 86 - protein, 183 aa, Artificial Sequence
  Condensation A
TTSFIEHLQHTKQTLIDAFRHQSYTLEDLLAALQLPRDFSRSPLISVSFNMDPSLTLPEFKDLKVSLPPSPISYTPFDLGFNLIELNDNLIIYCNYNTELFKKETIKQFLESFEILLRGIIDDANHLLYQLPLLTPVQQEKLLRQLTGKTRKLPEKATIIDDFVAQVKLTPNAPALIAGKISL

SEQ ID NO: 87 - DNA, 1071 bp, Artificial Sequence
  DH-ER
gttgcatacgttgcagaagacgcaacggccacgatgctggcagaggttgccctgccggggagcatacgtagccagcagggtctgtacgcaatacacccggccctgctggatgcatgtttccaatcggttggtgcccacccagatagccaaagcgttgggagcggtttactggttccgctgggggttcgtcgtgttcgggcctacgccccggttcgtaccgcacggtactgttacacccgtgttacgaaagttgagctggcaggtgttgaggccgatatagatgttctggatgcccacggtacggttctgttagccgtttgtggtctgcgtataggtacgggtgttagcgaacgtgataagcacaatcgtgttctgaatgagcgtttactgacgatcgaatggcaccagcgggaactgccggagatggatccaagcggtgcaggtaagtggctgctgatctcggactgtgccgccagcgacgttacggcaacgcgtttagccgacgccttccgtgaacacagcgcagcatgtacgacgatgcgttggccactgcacgatgaccagttagccgccgccgatcagttacgtgatcaggttgggagcgacgaattctcgggggttgttgttctgaccgggccgaatacgggtacgccgcaccaagggagcgccgatcggggtgccgaatacgttcgtcggctggttggtatcgcccgtgagctgagcgacttaccgggtgccgttccgcggatgtacgttgttacccgtggtgcccaacgtgttctggcagacgactgtgttaatttagaacagggtgggctgcgtgggctgctgcggacgatcggtgccgaacacccgcacttacgtgccacgcagatcgatgttgacgagcagacgggtgttgagcagttagcccgtcagctgttagccacgagcgaagaagacgaaacggcatggcgggataatgaatggtacgttgcccgtttatgtccgaccccactgcgtccacaggaacggcgtacgatcgttgccgatcaccagcaaagcgggatgcgtctgcaaatacgtaccccg

SEQ ID NO: 88 - protein, 336 aa, Artificial Sequence
  DH-ER
AAWHVDGDVWARVALPEAAASSAIRYGLHPALLDSSMHSLLLTQRLKAQVGDDVFVPFEAERLSVWKDGLAEVWVKVAEFELGEGEFWASLDLYDTSGEHVGRLQRLHARRIDRAALRRLAAAGVDRFLFRTEWQPVEAPEAVFGGTWGLLGGADAPWADEVRSRLMQAGAQVVDIARLSEAEACDGVIQLWGGDGQVVESSHRQAASALVQVQELALAGFAKPVIWLTRGAVGTSSDDPVSDLGASPLWGLLRTARNEHPELALRIVDLGDTAADLDTLASALALADEPECALRGAKVLAPRLKKAPANAGLVLPAEGNWRLEIATKGRLDQPLS

SEQ ID NO: 89 - protein, 357 aa, Artificial Sequence
  DH-ER
VAYVAEDATATMLAEVALPGSIRSQQGLYAIHPALLDACFQSVGAHPDSQSVGSGLLVPLGVRRVRAYAPVRTARYCYTRVTKVELAGVEADIDVLDAHGTVLLAVCGLRIGTGVSERDKHNRVLNERLLTIEWHQRELPEMDPSGAGKWLLISDCAASDVTATRLADAFREHSAACTTMRWPLHDDQLAAADQLRDQVGSDEFSGVVVLTGPNTGTPHQGSADRGAEYVRRLVGIARELSDLPGAVPRMYVVTRGAQRVLADDCVNLEQGGLRGLLRTIGAEHPHLRATQIDVDEQTGVEQLARQLLATSEEDETAWRDNEWYVARLCPTPLRPQERRTIVADHQQSGMRLQIRTP

SEQ ID NO: 90 - protein, 240 aa, Artificial Sequence
  DH-KR
AAWRQGDVVYADVRLPVPDGAEGLHPALLDAALHPARLLDDRDRTPRMPFLWAGVHRYDGGATQARVRIMRAGGHSAEQIAVQLAGPDGRALFEVEALTVRPVPRSVHQPTWVTVTPPATVPVEPGVLDLSGPPAHSPEEVRDQVWEAAEKLRSRLPGPRIVVVTRSAAVAGLIRVAITEYPGQVALVEWDGGAASDHVLPAAIRAAATAPEIRIADGRIGSPRLVRAAIAGPGTGGFGD

SEQ ID NO: 91 - protein, 335 aa, Artificial Sequence
  Dual Condensation A
AAWHVDGDVWARVALPEAAASSAIRYGLHPALLDSSMHSLLLTQRLKAQVGDDVFVPFEAERLSVKDGLAEVWVKVAEFELGEGEFWASLDLYDTSGEHVGRLQRLHARRIDRAALRRLAAAGVDRFLFRTEWQPVEAPEAVFGGTWGLLGGADAPWADEVRSRLMQAGAQVVDIARLSEAEACDGVIQLWGGDGQVVESSHRQAASALVQVQELALAGFAKPVIWLTRGAVGTSSDDPVSDLGASPLWGLLRTARNEHPELALRIVDLGDTAADLDTLASALALADEPECALRGAKVLAPRLKKAPANAGLVLPAEGNWRLEIATKGRLDQPLS

SEQ ID NO: 92 - DNA, 66 bp, Artificial Sequence
  ER-KR
ataccgcagaccggtaaatcgctggttacgttaccgccggaacaagcccaggttttccggccggat

SEQ ID NO: 93 - protein, 11 aa, Artificial Sequence
  ER-KR
PTQRRGMVDPD

SEQ ID NO: 94 - protein, 22 aa, Artificial Sequence
  ER-KR
IPQTGKSLVTLPPEQAQVFRPD

SEQ ID NO: 95 - protein, 183 aa, Artificial Sequence
  Heterocyclization A
PVAAFGERLATLHGRLWQDLDHRLCGGVEVLREIARRRGRAAAALPVTFTSTVSGAPTPGAGLMPGARLRYGISQTPQVWIDCQMMAEDGGLLLHWDVRDGVLPDGVAADMFAAFTELVERLADGDAVDEADPVVLPRRQRELVAAANDTAEPRVRGPLHAAFLDRARRDPGRVAVIAAGCTL

SEQ ID NO: 96 - protein, 18 aa, Artificial Sequence
  Joint AC-PC
LGTDSKLPGGRRGTSDEP

SEQ ID NO: 97 - DNA, 276 bp, Artificial Sequence
  KR-ACP
atcgggcgtgccatcgccttcgcagaacaaacgggtgacgccatcgcaccggaggaaggggcctacgccttcgaaacgttactgcgtcacaatcgtgcatactcgggttacgcaccagtgatcggttcgccgtggttaacggccttcgcccagcacagcccattcgccgaaaaattccaatcgctggggcagaatcggagcggtaccagcaagttcctggccgaattagttgatctgccgcgggaagaatggccggaccggctgcgtcgtctgtta

SEQ ID NO: 98 - protein, 109 aa, Artificial Sequence
  KR-ACP
QGMAARLSDADKTRFSRQGMEALGPTEALDLFEAAVMSDAPMAVAAALDLGRLQRTLEDNNGGSAPALYRELFSRAAGGRGAGGGAGGGAGLRKLLVETAVEQREAAVL

SEQ ID NO: 99 - protein, 92 aa, Artificial Sequence
  KR-ACP
IGRAIAFAEQTGDAIAPEEGAYAFETLLRHNRAYSGYAPVIGSPWLTAFAQHSPFAEKFQSLGQNRSGTSKFLAELVDLPREEWPDRLRRLL

SEQ ID NO: 100 - DNA, 318 bp, Artificial Sequence
  KS-AT
caggaagttcggccggccccggggcagggtctgtcgccagccgttagcaccttagttgttgccggtaaaacgatgcagcgtgtttcggcaaccgcagggatgctggccgattggatggagggtccgggggccgatgttgcactggcagacgttgcccacacgctgaatcaccaccggagccgtcaaccgaagttcggtaccgttgttgcacgtgaccggacccaggccatcgccggtttacgtgccctggccgccggtcaacacgccccaggtgttgttaatccggcagaagggagcccggggccggggacggttttc

SEQ ID NO: 101 - protein, 106 aa, Artificial Sequence
  KS-AT
QEVRPAPGQGLSPAVSTLVVAGKTMQRVSATAGMLADWMEGPGADVALADVAHTLNHHRSRQPKFGTVVARDRTQAIAGLRALAAGQHAPGVVNPAEGSPGPGTVF

SEQ ID NO: 102 - protein, 108 aa, Artificial Sequence
  KS-AT
KAAAPARAAKPAATPESLPFVLSAFTVPALRAQADKLHLHMGMNIQDRFLDVAYSLATTRTHFRKRLVVFAKGKSDLLDALASYGRTGEVPAGAVSMVDDRDECRLAL

SEQ ID NO: 103 - protein, 100 aa, Artificial Sequence
  Conserved Motif KS-AT
AEAGPEPERGPVPAVSTLVVFGKTAQRVAATASVLADWMEGPGAEVALADVAHTLNHHRARQTRFGTVVARDRAQAIAGLRALAAGQHAPGVVAPREGSP

SEQ ID NO: 104 - protein, 28 aa, Artificial Sequence
  Conserved Motif KS-AT
LADVAHTLNHHRARHAKFATVCARDRAQ

SEQ ID NO: 105 - protein, 31 aa, Artificial Sequence
  Conserved Motif KS-AT
PAVSTLVVSGKTPERIASTAGALADWLAGPG

SEQ ID NO: 106 - protein, 5 aa, Artificial Sequence
  Conserved Motif KS-AT
PGTVF

SEQ ID NO: 107 - protein, 22 aa, Artificial Sequence
  Conserved Motif KS-AT
AVAGLRALAAGQPAPGVVGPHD

SEQ ID NO: 108 - DNA, 12939 bp, Artificial Sequence; identical to SEQ ID NO: 23
  Ac-MalH-MalOH

SEQ ID NO: 109 - protein, 4312 aa, Artificial Sequence; identical to SEQ ID NO: 55
  Ac-MalH-MalOH

SEQ ID NO: 110 - DNA, 11286 bp, Artificial Sequence; identical to SEQ ID NO: 27
  Ac-MalOH-MalOH

SEQ ID NO: 111 - protein, 3761 aa, Artificial Sequence; identical to SEQ ID NO: 59
  Ac-MalOH-MalOH

SEQ ID NO: 112 - DNA, 14592 bp, Artificial Sequence; identical to SEQ ID NO: 22
  Ac-MalH-MalH

SEQ ID NO: 113 - protein, 4863 aa, Artificial Sequence; identical to SEQ ID NO: 54
  Ac-MalH-MalH

SEQ ID NO: 114 - DNA, 10029 bp, Artificial Sequence
  Ac-MalOH-MalH
atgaacccaccctgcgggccagtccgtgcgaattgcgtacacatatccatagatttccccatgccagtttccaaagtttccggtcctcgatcaaggacaaccagccggaggacacccgtccggattggggccgtggtggtggcaagctcgactagcgaactccttgatgggctcgcagcggttgctgatggtaggccacacgccagcgtagttaggggcgttgcgcgcccttctgcgccggttgtattcgttttcccaggtcaaggagcgcaatgggctgggatggcgggggagctactcggggagagtcgggtctttgcagccgctatggacgcctgcgcgagggcgttcgaacctgtaaccgattggacattggcccaagttttggattcaccagagcaatcccggcgtgtagaggtcgtccaacccgccctttttgcagtgcagacctctttggctgcactctggagatctttcggcgtgacacccgacgcagtcgtagggcactctatcggggagcttgcggcggcgcacgtctgtggggcagccggggcagctgacgcggcaagagctgccgcactgtggtcacgagaaatgatcccactagtggggaacggtgacatggcggcggttgcactctcggcagatgagattgaaccacggatcgcccgttgggacgacgacgtcgtgcttgctggtgttaatggtccccgctcggttttactaaccggcagccctgaaccagtagcaagaagggtacaagaactttcggcagagggagttcgggcacaggtcattaatgtgagcatggcggcccattccgcgcaggtggacgatattgcagaagggatgagatcggctctggcgtggtttgccccaggcgggtccgaagttccattttacgccagcctcactgggggagccgtggacacgcgagaactcgttgcggattactggcgacgctcattcagactgcccgttcgtttcgatgaagctataagatcagccctggaagttgggccaggtacattcgtcgaggcctcaccccacccagtcctggcggctgccctacagcagacactggacgcagaggggtcgtcggcagcggtggtccccacattacagcgggggcaaggcggaatgcgtcggttcctcttggcagcggcacaggcattcactggaggagtggccgtcgattggaccgcggcctatgatgatgtggggcctaacccggccctatgtcgatcgtctcggcgcccaagacggaaaacttcgcgaccgtcaccagcttcgacgggaacaagacatagaacttgctgcgaacggctgctcgccgtcgtgaacggcgaaactgccgcattagccggacgtgaagcagatgcagaggcaacctttcgagagcttgggttagattccgttctggcggcccagctcagagctaaagtatccgcggcgataggtcgagaagtcaatattgcactactctatgaccacccaaccccgagagcactcgcagaggcacttgctggcctaccccaggaaattaaacacacgccggcggttcggaccacatccgaagatccaattgccatcgtttcgatggcatgtcgtttaccgggaggagtcaatacgccccaacggctctgggaattactacgggagggtggtgaaaccttgtccgggttcccaacggaccgtggctgggacctagcacggcttcaccaccctgatccggacaaccccggaacgagctacgttgataagggtggatttctcgacgacgcggcgggtttcgacgcagagtttttcggggtttcaccaagggaagctgccgctatggaccctcagcaacgattacttttagagacctcgtgggagctagttgaaaatgcgggcatagatccacatagcctgcgagggacagcgacaggggtgttcctaggagttgcgaagtttggttatggtgaggacacagcagcagcggaagatgttgaaggttattcagttaccggtgttgctcccgctgtggcatctggccgcatatcctacactatgggtttagaaggtccttccatctcggtcgataccgcatgctcaagctcgctagtcgcgcttcatctagccgtagagtccctccgaaagggtgagtcatctatggcggtggtgggtggtgcagccgttatggcgactcctggggtatttgttgatttttcacgccaacgggcgcttgccgcagacggccgttccaaagcgttcggggcaggtgcagatggttttggtttcagcgagggagtcacgctggttctactagagcgtttaagtgaggcgcgtcgtaacggtcatgaagttctagctgtagtgcgcgggtccgcgttaaaccaggacggagcgagcaacggactttcagcaccctccggccctgcgcaacgtagagtaataaggcaagcgctcgaatcgtgtgggcttgaaccgggggatgttgacgcggttgaggcgcatggtactggtacagcactaggtgacccaatagaggccaatgcgctgttggacacttacgggcgagaccgtgatgcggatcgtccactttggttggggtccgttaagagcaatattgggcacactcaagctgcggccggggttacaggactgctgaaggttgtgttagcactgcgcaatggtgagctacctgcaacgttacatgtcgaggaaccaactccacacgtcgattggtcctcaggtggtgtcgcattactggcgggtaatcaaccatggcgaaggggagaaaggaccagaagggcggcagtgagcgcctttggtatctccggtacaaatgctcacgtgatagtggaagaggcgcctcaggaagttcgacccgcccctggccaagggctgtcgccagccgtgtccacgttagttgttgcaggtaaaaccatgcagcgtgtaagtgcgacagctggaatgcttgcagactggatggagggtcctggggccgatgttgcattggcggatgtggcccataccctgaaccatcaccgatcaagacagcccaagttcgggacggttgtagcgcgtgacaggactcaggcgatagctgggctccgtgcattggcggctggtcaacatgctcctggggtcgtcaacccagctgaaggttccccaggaccaggcaccgtgttcgtttttcccggtcaaggttcgcagagggcagggatgggggaggaactcgcggcagcctttcctgtcttcgctcgaatacatcagcaagtttgggacctcctagatgttcccgacctcgacgttaatgaaaccgggtacgcccaaccagcgctgttcgcgcttcaggtcgcgctctttggccttctggagtcgtggggtgttaggccagatgcagtggtagggcactcagttggtgagctggccgcggggtacgtgtccggtctttggtcactagaggacgcctgcacactagtctcagcaagagcgcgcctaatgcaggcactgcctgctggaggggtgatggcggcagtccccgtctccgaggatgaggcgcgggccgtcctgggcgagggagttgaaattgcggctgtgaatggaccctcgtccgttgtgctctcaggggacgaggcggcagtcttacaggccgccgaaggtctaggtaagtggacgcgactgccgaccagccatgcttttcactcagcgagaatggaacccatgctagaagagtttcgggccgtagcagagggtctgacctatcgtacccctcaagtagctatggctgctggggatcaggtgatgacagcagaatattgggtgcggcaggttcgggacacagttcgcttcggggagcaagtagcgtcattcgaggatgcggtgtttgttgagttaggcgctgacagaagtctagcgcgtttggtggacggcatcgccatgctgcacggtgaccacgaagcgcaggccgcggaccataggcaaatcaccgaagcggttgcggatgcttacgtcttaggccaccttccggattttgcggcgctgcggcggcctcacgcacgaaagttggacttaccaacttatcccttcgagcgtagacagtactggttcagagatgcgcgtgagaggccggaacaacccagagataccggcggacctcgcacagaagcagtccgtctgttagaggatggtaggattgaagaattagctgcacttttgggaggggccagtgatgaccaacacacattacaggtgctgactaagttggcggcgcaacataaccaacaacgaacaacccggtcaatcgctgacgacaggtacgaaataaggtgggaccgatcgacttccccactatccggagcagatgttgaccaagcggggagctggatcgtggtgtcagatgacgcagatgccgttcccccgctagtggacttgctggctgcacgtaacgagccccatcaggttgttggtctacccgcttcggacgcagacgaggagaggctcgcagagactctgcgtgcggctgcgactgaagatgctacccttcggatagtccacgttgcggcgctcgaagcaggcgctacccccagcatgcgttcactgctccgcatgcagcaccgaatactaggtggcacgcggcgggtgttcagggcagcggtcgcagcggagttaagaggtcccatttggatagtgacgcggggagcacaaagagtggctgacaccgatacagttgccccgcatcagtcatgcctctggggatttgggagggcagcatcgctggagctgccgcacgtttggggtggcctagcagatttatcagagggcggtgacaatgcggccgatgagtggagtgcgctagtggaccgcattgccgcaccccacggttcagcagttagggaggaccaactggcgctgagagacagggccgtatatacgccaagactggccagacgttctgcgcccccgagcgggactcccctacatctacgaggggatggcacagtgttaataacaggtgggactggtacactaggtaggctattagcgcgtcacctagtaacagagcatggggtgcggcatctcttactagtttcaaggagaggcgccgatgcccctggctcggatgaactgcgcgcagaaatagaggacttaggtgccagcgcggagatcgcagcgtgtgatacagcggatcgcgatgccctatctgccctactagatggtctcccccggccccttacgggtgtcgttcacgccgctggcgtgttagccgatggacttgtcactagcattgacgagcctgcggtggaacaggttctccgagcaaaggtggacgcggcatggaacctacacgaactcacagctaataccgggctatcctttttcgttcttttctcatcagcagcatcggtcctggcaggtccagggcaaggagtttatgcggctgcaaatgaatcgctcaacgcactagctgcgttaaggcgaactaggggtctgccggccaaggctctgggatggggcctgtgggccatcgggcgggcaatcgcttttgcggagcagaccggggacgccatcgctccagaggaaggagcatacgcttttgaaactctgttaaggcataaccgtgcctactcgggatatgcgcccgtcattggatctccctggttgaccgcgttcgcacagcattccccctttgcagaaaaattccaatcactcggacagaatcggtcagggacatcgaaattcttagcggagctagttgacctgcctcgtgaggaatggccggataggctcaggagactactagagttagttaggtcccatgccgccgcggtctccggttacggtagtgcagatcaactgccggaaagaaaagcgttcaaggatttggggtttgattcgctggccgccgttgaactgcgtaaccggctgggaacggctacaggggtacgactgccgtcaaccctagtatttgatcacccaactccgctggccgtcgctgagcacttaagagataggctattggcttccgctcgtgctccgcgtgacgtccgccaaacagctcacgctgacgctgctgaaccggctggcgacgacggccttcagcacttgcccttagtagctgcgcaacctggaatatggatggccgagaagttatctgaactaccatcagcgtggagcgtagcgcattacgtggagctcactggtgaggttgactcgcctcttttggccagggcggtagtggctggccttgcacaagctgacaccttaagaatgcgtttcacagaggataatggggaagtttggcaatgggtagacgatgcgttaacatttgagttaccggaaatcatagacctgcgcactaacatagaccctcacgggacagctcaggccttgatgcaagcggacctgcaacaggacctacgtgtggattcggggaagcctctggtcttccatcagctaattcaagtagcggacaatcgctggtactggtatcaaaggtaccaccacttgcttgtggacgggttcagttttccagcgataaccaggcaaatagccaacatttattgcacttggttgcgaggagagcctacgcccgcatcccccttcacgccattcgcagacgttgttgaggaataccaacagtatcgcgagagcgaagcgtggcaacgcgatgcggcattctgggcggagcaacgacggcaactaccgcctcccgcatccctatcacctgccccgctccccggccggtccgcgtcagccgacattctacggctaaagctggagttcacagatggtgaatttcgacagcttgctacacaactcagcggggtacaaaggacagacctagcgctcgctctggctgcattatggctaggacgactttgcaatcgaatggactacgcggcgggtttcatatttatgcgccggctcggcagcgcagcgttgaccgcaacgggtccagttttaaatgttcttcctttgggaatccacataggcaacccaagcttctctgagcttctcaccagggttcgcgaggtcgccttaggcgcgtatgcacaccaacatattccttttgagatgttagtagaggcactgcaaccagagcgaaaccttagccatactcctctcttccaagtgatgtttgtccttcagaatgcgcccgcgtcccaattagagttaaccgggatcaccgcaaacccaattaaggttaaatcaactaccacgaagttcgacctaactttaatcatgcaaaacacagctagcggattagtaggtgtttgggagtacaacacggatttattcgacgcgtcaacgattgagcgaatgacagggcactttgtaaccctcctcgagggcgttatcgccaatccacaacagccgatctctcaacttcctattttaactacagtggagcaacagcaacttttagtcgagtggaataacacgcaaaccgactaccccgctgataagtgtatacatcaattattcgaggaacaggtcgagcgcacaccagacgccgttgctgtcgtctttgggaatcagcaactcacatacgcgcaattagacatgtatgcaaatcgattggctagactaactgcccacggaattaccaaggagtcaatagtcggtgtactttctgagcgttcgccagatatgctgactgcagttctcgctgtgttaaaggcaggaggtgcatacgtcccacttgaccccgtatatcctgaggaaagactctcttacatgttaaaagattcgggagccgcgttacttctgacgcaaccagggctgaaggcgccggtcttctctggcaaaacgctcgaggtagacatgacatcattagccaacgaggagagtgagtatcacagcttgcatcaggctgactctgattcgctagcctacgtaatatatacgtcaggatccacaggtcaaccaaagggggttgcggtggagcacttgcaggcagtctctttcttaacaggaatgcaaatgcagtttcctcttgaggaagacgatataatcatgatgaagacgagtttcagctttgacgcgtctgtatggcaattattctggtggacattatcaggagcatccgcttacttgctaccatcgggttgggagaaggatccggctttaatggttaaagccatacgcgaggaaggtgtcacgacagcgcatttcatcccagcaatgcttaattcctttctggaccaagcggagatagaagcacctcggtctttaaagagggtcttcgctggaggagagccacttgcaccacacactgcagctcgatttgcctcactcttacccgagacctccttagtacatggatatggtccaactgaggcaaccgttgacgccgcgttctacgcctgcgatccggagttagacaaggatcggcttcgcctgcctataggaaaacctgtcccaggtgcgcggctttatgtactggacccccacctggccgttcaacctgtcggggtagcgggcgagttgtatatagcaggagcaggagtagcacgaggttaccttaacagacctgagctgactgaggaacgattcttagacgatcccttttaccctggggagagaatgtataagaccggcgacttggcccattggctaccagatgggcaagtagagttcttgggccgcctagacgatcaggtcaagatccgtggatacaggattgagcctggagagtgtgaagcagctcttcgttctatagagggggttagggacgccgcggtggcttcgtgtgctattgcgcgggaggacatacctgggaacaaacaccttgtagcgtacatagttcctcaagaggagcaaacatgcactgagcgatcgaggtccacacttacagtttcgttcgtccggagtttccttaaggagaaactccccgaatatatggtaccgagcgcaatagtgattctagacgctctccccctgactcctaatggaaagctagaccggcgggcgttacccgcccctgacctgcactcacaacttgagacaattattgctgcggctttctcgagcctgctcgggtgcgacgtacaagacgcggatgctgactttttcgcgctaggtggccattcgctgcttgccatgaagctagccgctcagctttcccgacaagtagcgcggcaggtgacaccaggccaagttatggtagcttcgactgtcgcaaagctcgcaacgatcatagacgcggagttagataaatacgtcgctccaaggaacccgataacatccggggaagataaccctatccccctatgtcaaggcgatggggaggagatgagcacatggctacgtcgttttggacccccagtcgaacatcgggccaggctagtgtgtttcccccacgcaggcgcagcggcggattcatacttagacctagcaagagcgttagcaccagagatcgatgttcatgctgttcaataccccggcaggcaagacagaagggacgaggagccattaggaaccgcaggtgaaattgcagatgaagtggcagcggtgctacgtgcgtcgggaggggatgggccttttgcacttttcggccacagtatgggcgccctcatcgcgtacgagacagcaaggcgattagagagggaaccgggagggggacccttacgtttattcgtgagcggacaaacagcgccacgtgtccatgaacgaagaactgatctgcccggtgacgatggactcgtggacgagcttaggcgacttggcacctccgaggcagcgctcgcagacgaagccctgctggctatgtctctcccggtgctcagggcggattatagggtgttaagatcctacgcttgggcggatggtcccccactacgcgccggtataactgccctctgcggtgatgcagacccactaactgcaacaggggatgcggaacgctggttacaacattccgtgattccgggtcggacacggacatttcccggtgggcatttttatttaggggaacaagtgaccgaggtggcaggggctgtccgtagagatttactgagagcagggttagcgggttga

SEQ ID NO: 115 - protein, 4312 aa, Artificial Sequence; identical to SEQ ID NO: 58
  Ac-MalOH-MalH

SEQ ID NO: 116 - DNA, 10029 bp, Artificial Sequence
  Ac-Ser-MalOH
atgaacccaccctgcgggccagtccgtgcgaattgcgtacacatatccatagatttccccatgccagtttccaaagtttccggtcctcgatcaaggacaaccagccggaggacacccgtccggattggggccgtggtggtggcaagctcgactagcgaactccttgatgggctcgcagcggttgctgatggtaggccacacgccagcgtagttaggggcgttgcgcgcccttctgcgccggttgtattcgttttcccaggtcaaggagcgcaatgggctgggatggcgggggagctactcggggagagtcgggtctttgcagccgctatggacgcctgcgcgagggcgttcgaacctgtaaccgattggacattggcccaagttttggattcaccagagcaatcccggcgtgtagaggtcgtccaacccgccctttttgcagtgcagacctctttggctgcactctggagatctttcggcgtgacacccgacgcagtcgtagggcactctatcggggagcttgcggcggcgcacgtctgtggggcagccggggcagctgacgcggcaagagctgccgcactgtggtcacgagaaatgatcccactagtggggaacggtgacatggcggcggttgcactctcggcagatgagattgaaccacggatcgcccgttgggacgacgacgtcgtgcttgctggtgttaatggtccccgctcggttttactaaccggcagccctgaaccagtagcaagaagggtacaagaactttcggcagagggagttcgggcacaggtcattaatgtgagcatggcggcccattccgcgcaggtggacgatattgcagaagggatgagatcggctctggcgtggtttgccccaggcgggtccgaagttccattttacgccagcctcactgggggagccgtggacacgcgagaactcgttgcggattactggcgacgctcattcagactgcccgttcgtttcgatgaagctataagatcagccctggaagttgggccaggtacattcgtcgaggcctcaccccacccagtcctggcggctgccctacagcagacactggacgcagaggggtcgtcggcagcggtggtccccacattacagcgggggcaaggcggaatgcgtcggttcctcttggcagcggcacaggcattcactggaggagtggccgtcgattggaccgcggcctatgatgatgtggggcctaacccggccctatgtcgatcgtctcggcgcccaagacggaaaacttcgcgaccgtcaccagcttcgacgggaacaagacatagaacttgctgcgaacggctgctcgccgtcgtgaacggcgaaactgccgcattagccggacgtgaagcagatgcagaggcaacctttcgagagcttgggttagattccgttctggcggcccagctcagagctaaagtatccgcggcgataggtcgagaagtcaatattgcactactctatgaccacccaaccccgagagcactcgcagaggcacttgctgccattcagacaggcgcatcactgtcaattccggcaatccaatcgcgcagcaaccgtgaccagcacttgcccttagtagctgcgcaacctggaatatggatggccgagaagttatctgaactaccatcagcgtggagcgtagcgcattacgtggagctcactggtgaggttgactcgcctcttttggccagggcggtagtggctggccttgcacaagctgacaccttaagaatgcgtttcacagaggataatggggaagtttggcaatgggtagacgatgcgttaacatttgagttaccggaaatcatagacctgcgcactaacatagaccctcacgggacagctcaggccttgatgcaagcggacctgcaacaggacctacgtgtggattcggggaagcctctggtcttccatcagctaattcaagtagcggacaatcgctggtactggtatcaaaggtaccaccacttgcttgtggacgggttcagttttccagcgataaccaggcaaatagccaacatttattgcacttggttgcgaggagagcctacgcccgcatcccccttcacgccattcgcagacgttgttgaggaataccaacagtatcgcgagagcgaagcgtggcaacgcgatgcggcattctgggcggagcaacgacggcaactaccgcctcccgcatccctatcacctgccccgctccccggccggtccgcgtcagccgacattctacggctaaagctggagttcacagatggtgaatttcgacagcttgctacacaactcagcggggtacaaaggacagacctagcgctcgctctggctgcattatggctaggacgactttgcaatcgaatggactacgcggcgggtttcatatttatgcgccggctcggcagcgcagcgttgaccgcaacgggtccagttttaaatgttcttcctttgggaatccacataggcaacccaagcttctctgagcttctcaccagggttcgcgaggtcgccttaggcgcgtatgcacaccaacatattccttttgagatgttagtagaggcactgcaaccagagcgaaaccttagccatactcctctcttccaagtgatgtttgtccttcagaatgcgcccgcgtcccaattagagttaaccgggatcaccgcaaacccaattaaggttaaatcaactaccacgaagttcgacctaactttaatcatgcaaaacacagctagcggattagtaggtgtttgggagtacaacacggatttattcgacgcgtcaacgattgagcgaatgacagggcactttgtaaccctcctcgagggcgttatcgccaatccacaacagccgatctctcaacttcctattttaactacagtggagcaacagcaacttttagtcgagtggaataacacgcaaaccgactaccccgctgataagtgtatacatcaattattcgaggaacaggtcgagcgcacaccagacgccgttgctgtcgtctttgggaatcagcaactcagctatcgagagatgcgcgaacaagtggttgcactcgccaatttattacgtgagcggggagtcaagccaggagactccgttgccgtggccttaccacgctctgttttcttaacccttgcactacacgcgattgtcgaggcaggtgccgcctggctacctcttgacacaggatatcctgacgatagattaaaaatgatgctcgaggatgcacggccttcccttctgatcacaacagacgatcaattaccccgcttcagtgacgtacctaatctgacctcactctgttacaacgctcccttgacgcctcaagggagcgcccctttacagctgtctcaacctcaccatactgcatatatcatctttacaagtggttctacgggacgccccaagggagtaatggttggtcagactgcgattgtaaatcgtctgttgtggatgcaaaaccactaccctttgacgggggaggacgttgtagcccaaaagactccttgctcgttcgatgtctcagtctgggagttcttttggccatttatagcaggggccaaattagttatggcggagccggaagcccaccgagacccacttgcgatgcagcaattctttgctgagtatggtgtcaccactacacatttcgtcccatcgatgttagcggccttcgtggcttctcttactccacaaacggctaggcaatcttgtgccacactaaagcaagtcttctgctccggcgaggcattacctgcagacttgtgccgggaatggcagcaactcacaggagctccattgcacaatctatacggaccgaccgaggccgcagtagacgtatcttggtatcctgcgtttggcgaggagttagcgcaagtaagaggttcgtcagtaccaataggataccccgtatggaacacggggcttcggatactggacgcgatgatgcatccggtcccaccaggagtcgcgggcgatttatacctgactgggatacagctggcccaaggttacctagggagacctgaccttacggcgtcgaggttcatagcggatccgtttgctccgggtgagcgcatgtaccgtacgggcgacgtcgcgcgatggctagataatggcgccgtagagtatcttggtagatcagacgatcagttaaagatacggggacaacgaatagagcttggggaaatagaccgggtaatgcaggctttgccagatgtcgagcaagcggtggcttcgtgtgctattgcgcgggaggacatacctgggaacaaacaccttgtagcgtacatagttcctcaagaggagcaaacatgcactgagcgatcgaggtccacacttacagtttcgttcgtccggagtttccttaaggagaaactccccgaatatatggtaccgagcgcaatagtgattctagacgctctccccctgactcctaatggaaagctagaccggcgggcgttacccgcccctgacctgcactcacaacttgagacaattattgctgcggctttctcgagcctgctcgggtgcgacgtacaagacgcggatgctgactttttcgcgctaggtggccattcgctgcttgccatgaagctagccgctcagctttcccgacaagtagcgcggcaggtgacaccaggccaagttatggtagcttcgactgtcgcaaagctcgcaacgatcatagacgcggagttagataaatacgtcgctccaaggaacccgatacctggaattggggcgctagttcccgctcccgtggtaatcgcagcaggccgtacggaggaaccaattgccatcgtttcgatggcatgtcgtttaccgggaggagtcaatacgccccaacggctctgggaattactacgggagggtggtgaaaccttgtccgggttcccaacggaccgtggctgggacctagcacggcttcaccaccctgatccggacaaccccggaacgagctacgttgataagggtggatttctcgacgacgcggcgggtttcgacgcagagtttttcggggtttcaccaagggaagctgccgctatggaccctcagcaacgattacttttagagacctcgtgggagctagttgaaaatgcgggcatagatccacatagcctgcgagggacagcgacaggggtgttcctaggagttgcgaagtttggttatggtgaggacacagcagcagcggaagatgttgaaggttattcagttaccggtgttgctcccgctgtggcatctggccgcatatcctacactatgggtttagaaggtccttccatctcggtcgataccgcatgctcaagctcgctagtcgcgcttcatctagccgtagagtccctccgaaagggtgagtcatctatggcggtggtgggtggtgcagccgttatggcgactcctggggtatttgttgatttttcacgccaacgggcgcttgccgcagacggccgttccaaagcgttcggggcaggtgcagatggttttggtttcagcgagggagtcacgctggttctactagagcgtttaagtgaggcgcgtcgtaacggtcatgaagttctagctgtagtgcgcgggtccgcgttaaaccaggacggagcgagcaacggactttcagcaccctccggccctgcgcaacgtagagtaataaggcaagcgctcgaatcgtgtgggcttgaaccgggggatgttgacgcggttgaggcgcatggtactggtacagcactaggtgacccaatagaggccaatgcgctgttggacacttacgggcgagaccgtgatgcggatcgtccactttggttggggtccgttaagagcaatattgggcacactcaagctgcggccggggttacaggactgctgaaggttgtgttagcactgcgcaatggtgagctacctgcaacgttacatgtcgaggaaccaactccacacgtcgattggtcctcaggtggtgtcgcattactggcgggtaatcaaccatggcgaaggggagaaaggaccagaagggcggcagtgagcgcctttggtatctccggtacaaatgctcacgtgatagtggaagaggcgcctcaggaagttcgacccgcccctggccaagggctgtcgccagccgtgtccacgttagttgttgcaggtaaaaccatgcagcgtgtaagtgcgacagctggaatgcttgcagactggatggagggtcctggggccgatgttgcattggcggatgtggcccataccctgaaccatcaccgatcaagacagcccaagttcgggacggttgtagcgcgtgacaggactcaggcgatagctgggctccgtgcattggcggctggtcaacatgctcctggggtcgtcaacccagctgaaggttccccaggaccaggcaccgtgttcgtttttcccggtcaaggttcgcagagggcagggatgggggaggaactcgcggcagcctttcctgtcttcgctcgaatacatcagcaagtttgggacctcctagatgttcccgacctcgacgttaatgaaaccgggtacgcccaaccagcgctgttcgcgcttcaggtcgcgctctttggccttctggagtcgtggggtgttaggccagatgcagtggtagggcactcagttggtgagctggccgcggggtacgtgtccggtctttggtcactagaggacgcctgcacactagtctcagcaagagcgcgcctaatgcaggcactgcctgctggaggggtgatggcggcagtccccgtctccgaggatgaggcgcgggccgtcctgggcgagggagttgaaattgcggctgtgaatggaccctcgtccgttgtgctctcaggggacgaggcggcagtcttacaggccgccgaaggtctaggtaagtggacgcgactgccgaccagccatgcttttcactcagcgagaatggaacccatgctagaagagtttcgggccgtagcagagggtctgacctatcgtacccctcaagtagctatggctgctggggatcaggtgatgacagcagaatattgggtgcggcaggttcgggacacagttcgcttcggggagcaagtagcgtcattcgaggatgcggtgtttgttgagttaggcgctgacagaagtctagcgcgtttggtggacggcatcgccatgctgcacggtgaccacgaagcgcaggccgcggaccataggcaaatcaccgaagcggttgcggatgcttacgtcttaggccaccttccggattttgcggcgctgcggcggcctcacgcacgaaagttggacttaccaacttatcccttcgagcgtagacagtactggttcagagatgcgcgtgagaggccggaacaacccagagataccggcggacctcgcacagaagcagtccgtctgttagaggatggtaggattgaagaattagctgcacttttgggaggggccagtgatgaccaacacacattacaggtgctgactaagttggcggcgcaacataaccaacaacgaacaacccggtcaatcgctgacgacaggtacgaaataaggtgggaccgatcgacttccccactatccggagcagatgttgaccaagcggggagctggatcgtggtgtcagatgacgcagatgccgttcccccgctagtggacttgctggctgcacgtaacgagccccatcaggttgttggtctacccgcttcggacgcagacgaggagaggctcgcagagactctgcgtgcggctgcgactgaagatgctacccttcggatagtccacgttgcggcgctcgaagcaggcgctacccccagcatgcgttcactgctccgcatgcagcaccgaatactaggtggcacgcggcgggtgttcagggcagcggtcgcagcggagttaagaggtcccatttggatagtgacgcggggagcacaaagagtggctgacaccgatacagttgccccgcatcagtcatgcctctggggatttgggagggcagcatcgctggagctgccgcacgtttggggtggcctagcagatttatcagagggcggtgacaatgcggccgatgagtggagtgcgctagtggaccgcattgccgcaccccacggttcagcagttagggaggaccaactggcgctgagagacagggccgtatatacgccaagactggccagacgttctgcgcccccgagcgggactcccctacatctacgaggggatggcacagtgttaataacaggtgggactggtacactaggtaggctattagcgcgtcacctagtaacagagcatggggtgcggcatctcttactagtttcaaggagaggcgccgatgcccctggctcggatgaactgcgcgcagaaatagaggacttaggtgccagcgcggagatcgcagcgtgtgatacagcggatcgcgatgccctatctgccctactagatggtctcccccggccccttacgggtgtcgttcacgccgctggcgtgttagccgatggacttgtcactagcattgacgagcctgcggtggaacaggttctccgagcaaaggtggacgcggcatggaacctacacgaactcacagctaataccgggctatcctttttcgttcttttctcatcagcagcatcggtcctggcaggtccagggcaaggagtttatgcggctgcaaatgaatcgctcaacgcactagctgcgttaaggcgaactaggggtctgccggccaaggctctgggatggggcctgtgggccatcgggcgggcaatcgcttttgcggagcagaccggggacgccatcgctccagaggaaggagcatacgcttttgaaactctgttaaggcataaccgtgcctactcgggatatgcgcccgtcattggatctccctggttgaccgcgttcgcacagcattccccctttgcagaaaaattccaatcactcggacagaatcggtcagggacatcgaaattcttagcggagctagttgacctgcctcgtgaggaatggccggataggctcaggagactactagagttagttaggtcccatgccgccgcggtctccggttacggtagtgcagatcaactgccggaaagaaaagcgttcaaggatttggggtttgattcgctggccgccgttgaactgcgtaaccggctgggaacggctacaggggtacgactgccgtcaaccctagtatttgatcacccaactccgctggccgtcgctgagcacttaagagataggctaacatccggggaagataaccctatccccctatgtcaaggcgatggggaggagatgagcacatggctacgtcgttttggacccccagtcgaacatcgggccaggctagtgtgtttcccccacgcaggcgcagcggcggattcatacttagacctagcaagagcgttagcaccagagatcgatgttcatgctgttcaataccccggcaggcaagacagaagggacgaggagccattaggaaccgcaggtgaaattgcagatgaagtggcagcggtgctacgtgcgtcgggaggggatgggccttttgcacttttcggccacagtatgggcgccctcatcgcgtacgagacagcaaggcgattagagagggaaccgggagggggacccttacgtttattcgtgagcggacaaacagcgccacgtgtccatgaacgaagaactgatctgcccggtgacgatggactcgtggacgagcttaggcgacttggcacctccgaggcagcgctcgcagacgaagccctgctggctatgtctctcccggtgctcagggcggattatagggtgttaagatcctacgcttgggcggatggtcccccactacgcgccggtataactgccctctgcggtgatgcagacccactaactgcaacaggggatgcggaacgctggttacaacattccgtgattccgggtcggacacggacatttcccggtgggcatttttatttaggggaacaagtgaccgaggtggcaggggctgtccgtagagatttactgagagcagggttagcgggttga

SEQ ID NO: 117 - protein, 3342 aa, Artificial Sequence
  Ac-Ser-MalOH
MNPPCGPVRANCVHISIDFPMPVSKVSGPRSRTTSRRTPVRIGAVVVASSTSELLDGLAAVADGRPHASVVRGVARPSAPVVFVFPGQGAQWAGMAGELLGESRVFAAAMDACARAFEPVTDWTLAQVLDSPEQSRRVEVVQPALFAVQTSLAALWRSFGVTPDAVVGHSIGELAAAHVCGAAGAADAARAAALWSREMIPLVGNGDMAAVALSADEIEPRIARWDDDVVLAGVNGPRSVLLTGSPEPVARRVQELSAEGVRAQVINVSMAAHSAQVDDIAEGMRSALAWFAPGGSEVPFYASLTGGAVDTRELVADYWRRSFRLPVRFDEAIRSALEVGPGTFVEASPHPVLAAALQQTLDAEGSSAAVVPTLQRGQGGMRRFLLAAAQAFTGGVAVDWTAAYDDVGPNPALCRSSRRPRRKTSRPSPASTGTRHRTCCERLLAVVNGETAALAGREADAEATFRELGLDSVLAAQLRAKVSAAIGREVNIALLYDHPTPRALAEALAAIQTGASLSIPAIQSRSNRDQHLPLVAAQPGIWMAEKLSELPSAWSVAHYVELTGEVDSPLLARAVVAGLAQADTLRMRFTEDNGEVWQWVDDALTFELPEIIDLRTNIDPHGTAQALMQADLQQDLRVDSGKPLVFHQLIQVADNRWYWYQRYHHLLVDGFSFPAITRQIANIYCTWLRGEPTPASPFTPFADVVEEYQQYRESEAWQRDAAFWAEQRRQLPPPASLSPAPLPGRSASADILRLKLEFTDGEFRQLATQLSGVQRTDLALALAALWLGRLCNRMDYAAGFIFMRRLGSAALTATGPVLNVLPLGIHIGNPSFSELLTRVREVALGAYAHQHIPFEMLVEALQPERNLSHTPLFQVMFVLQNAPASQLELTGITANPIKVKSTTTKFDLTLIMQNTASGLVGVWEYNTDLFDASTIERMTGHFVTLLEGVIANPQQPISQLPILTTVEQQQLLVEWNNTQTDYPADKCIHQLFEEQVERTPDAVAVVFGNQQLSYREMREQVVALANLLRERGVKPGDSVAVALPRSVFLTLALHAIVEAGAAWLPLDTGYPDDRLKMMLEDARPSLLITTDDQLPRFSDVPNLTSLCYNAPLTPQGSAPLQLSQPHHTAYIIFTSGSTGRPKGVMVGQTAIVNRLLWMQNHYPLTGEDVVAQKTPCSFDVSVWEFFWPFIAGAKLVMAEPEAHRDPLAMQQFFAEYGVTTTHFVPSMLAAFVASLTPQTARQSCATLKQVFCSGEALPADLCREWQQLTGAPLHNLYGPTEAAVDVSWYPAFGEELAQVRGSSVPIGYPVWNTGLRILDAMMHPVPPGVAGDLYLTGIQLAQGYLGRPDLTASRFIADPFAPGERMYRTGDVARWLDNGAVEYLGRSDDQLKIRGQRIELGEIDRVMQALPDVEQAVASCAIAREDIPGNKHLVAYIVPQEEQTCTERSRSTLTVSFVRSFLKEKLPEYMVPSAIVILDALPLTPNGKLDRRALPAPDLHSQLETIIAAAFSSLLGCDVQDADADFFALGGHSLLAMKLAAQLSRQVARQVTPGQVMVASTVAKLATIIDAELDKYVAPRNPIPGIGALVPAPVVIAAGRTEEPIAIVSMACRLPGGVNTPQRLWELLREGGETLSGFPTDRGWDLARLHHPDPDNPGTSYVDKGGFLDDAAGFDAEFFGVSPREAAAMDPQQRLLLETSWELVENAGIDPHSLRGTATGVFLGVAKFGYGEDTAAAEDVEGYSVTGVAPAVASGRISYTMGLEGPSISVDTACSSSLVALHLAVESLRKGESSMAVVGGAAVMATPGVFVDFSRQRALAADGRSKAFGAGADGFGFSEGVTLVLLERLSEARRNGHEVLAVVRGSALNQDGASNGLSAPSGPAQRRVIRQALESCGLEPGDVDAVEAHGTGTALGDPIEANALLDTYGRDRDADRPLWLGSVKSNIGHTQAAAGVTGLLKVVLALRNGELPATLHVEEPTPHVDWSSGGVALLAGNQPWRRGERTRRAAVSAFGISGTNAHVIVEEAPQEVRPAPGQGLSPAVSTLVVAGKTMQRVSATAGMLADWMEGPGADVALADVAHTLNHHRSRQPKFGTVVARDRTQAIAGLRALAAGQHAPGVVNPAEGSPGPGTVFVFPGQGSQRAGMGEELAAAFPVFARIHQQVWDLLDVPDLDVNETGYAQPALFALQVALFGLLESWGVRPDAVVGHSVGELAAGYVSGLWSLEDACTLVSARARLMQALPAGGVMAAVPVSEDEARAVLGEGVEIAAVNGPSSVVLSGDEAAVLQAAEGLGKWTRLPTSHAFHSARMEPMLEEFRAVAEGLTYRTPQVAMAAGDQVMTAEYWVRQVRDTVRFGEQVASFEDAVFVELGADRSLARLVDGIAMLHGDHEAQAADHRQITEAVADAYVLGHLPDFAALRRPHARKLDLPTYPFERRQYWFRDARERPEQPRDTGGPRTEAVRLLEDGRIEELAALLGGASDDQHTLQVLTKLAAQHNQQRTTRSIADDRYEIRWDRSTSPLSGADVDQAGSWIVVSDDADAVPPLVDLLAARNEPHQVVGLPASDADEERLAETLRAAATEDATLRIVHVAALEAGATPSMRSLLRMQHRILGGTRRVFRAAVAAELRGPIWIVTRGAQRVADTDTVAPHQSCLWGFGRAASLELPHVWGGLADLSEGGDNAADEWSALVDRIAAPHGSAVREDQLALRDRAVYTPRLARRSAPPSGTPLHLRGDGTVLITGGTGTLGRLLARHLVTEHGVRHLLLVSRRGADAPGSDELRAEIEDLGASAEIAACDTADRDALSALLDGLPRPLTGVVHAAGVLADGLVTSIDEPAVEQVLRAKVDAAWNLHELTANTGLSFFVLFSSAASVLAGPGQGVYAAANESLNALAALRRTRGLPAKALGWGLWAIGRAIAFAEQTGDAIAPEEGAYAFETLLRHNRAYSGYAPVIGSPWLTAFAQHSPFAEKFQSLGQNRSGTSKFLAELVDLPREEWPDRLRRLLELVRSHAAAVSGYGSADQLPERKAFKDLGFDSLAAVELRNRLGTATGVRLPSTLVFDHPTPLAVAEHLRDRLTSGEDNPIPLCQGDGEEMSTWLRRFGPPVEHRARLVCFPHAGAAADSYLDLARALAPEIDVHAVQYPGRQDRRDEEPLGTAGEIADEVAAVLRASGGDGPFALFGHSMGALIAYETARRLEREPGGGPLRLFVSGQTAPRVHERRTDLPGDDGLVDELRRLGTSEAALADEALLAMSLPVLRADYRVLRSYAWADGPPLRAGITALCGDADPLTATGDAERWLQHSVIPGRTRTFPGGHFYLGEQVTEVAGAVRRDLLRAGLAG

SEQ ID NO: 118 - DNA, 11682 bp, Artificial Sequence
  Ac-Ser-MalH
atgaacccaccctgcgggccagtccgtgcgaattgcgtacacatatccatagatttccccatgccagtttccaaagtttccggtcctcgatcaaggacaaccagccggaggacacccgtccggattggggccgtggtggtggcaagctcgactagcgaactccttgatgggctcgcagcggttgctgatggtaggccacacgccagcgtagttaggggcgttgcgcgcccttctgcgccggttgtattcgttttcccaggtcaaggagcgcaatgggctgggatggcgggggagctactcggggagagtcgggtctttgcagccgctatggacgcctgcgcgagggcgttcgaacctgtaaccgattggacattggcccaagttttggattcaccagagcaatcccggcgtgtagaggtcgtccaacccgccctttttgcagtgcagacctctttggctgcactctggagatctttcggcgtgacacccgacgcagtcgtagggcactctatcggggagcttgcggcggcgcacgtctgtggggcagccggggcagctgacgcggcaagagctgccgcactgtggtcacgagaaatgatcccactagtggggaacggtgacatggcggcggttgcactctcggcagatgagattgaaccacggatcgcccgttgggacgacgacgtcgtgcttgctggtgttaatggtccccgctcggttttactaaccggcagccctgaaccagtagcaagaagggtacaagaactttcggcagagggagttcgggcacaggtcattaatgtgagcatggcggcccattccgcgcaggtggacgatattgcagaagggatgagatcggctctggcgtggtttgccccaggcgggtccgaagttccattttacgccagcctcactgggggagccgtggacacgcgagaactcgttgcggattactggcgacgctcattcagactgcccgttcgtttcgatgaagctataagatcagccctggaagttgggccaggtacattcgtcgaggcctcaccccacccagtcctggcggctgccctacagcagacactggacgcagaggggtcgtcggcagcggtggtccccacattacagcgggggcaaggcggaatgcgtcggttcctcttggcagcggcacaggcattcactggaggagtggccgtcgattggaccgcggcctatgatgatgtggggcctaacccggccctatgtcgatcgtctcggcgcccaagacggaaaacttcgcgaccgtcaccagcttcgacgggaacaagacatagaacttgctgcgaacggctgctcgccgtcgtgaacggcgaaactgccgcattagccggacgtgaagcagatgcagaggcaacctttcgagagcttgggttagattccgttctggcggcccagctcagagctaaagtatccgcggcgataggtcgagaagtcaatattgcactactctatgaccacccaaccccgagagcactcgcagaggcacttgctgccattcagacaggcgcatcactgtcaattccggcaatccaatcgcgcagcaaccgtgaccagcacttgcccttagtagctgcgcaacctggaatatggatggccgagaagttatctgaactaccatcagcgtggagcgtagcgcattacgtggagctcactggtgaggttgactcgcctcttttggccagggcggtagtggctggccttgcacaagctgacaccttaagaatgcgtttcacagaggataatggggaagtttggcaatgggtagacgatgcgttaacatttgagttaccggaaatcatagacctgcgcactaacatagaccctcacgggacagctcaggccttgatgcaagcggacctgcaacaggacctacgtgtggattcggggaagcctctggtcttccatcagctaattcaagtagcggacaatcgctggtactggtatcaaaggtaccaccacttgcttgtggacgggttcagttttccagcgataaccaggcaaatagccaacatttattgcacttggttgcgaggagagcctacgcccgcatcccccttcacgccattcgcagacgttgttgaggaataccaacagtatcgcgagagcgaagcgtggcaacgcgatgcggcattctgggcggagcaacgacggcaactaccgcctcccgcatccctatcacctgccccgctccccggccggtccgcgtcagccgacattctacggctaaagctggagttcacagatggtgaatttcgacagcttgctacacaactcagcggggtacaaaggacagacctagcgctcgctctggctgcattatggctaggacgactttgcaatcgaatggactacgcggcgggtttcatatttatgcgccggctcggcagcgcagcgttgaccgcaacgggtccagttttaaatgttcttcctttgggaatccacataggcaacccaagcttctctgagcttctcaccagggttcgcgaggtcgccttaggcgcgtatgcacaccaacatattccttttgagatgttagtagaggcactgcaaccagagcgaaaccttagccatactcctctcttccaagtgatgtttgtccttcagaatgcgcccgcgtcccaattagagttaaccgggatcaccgcaaacccaattaaggttaaatcaactaccacgaagttcgacctaactttaatcatgcaaaacacagctagcggattagtaggtgtttgggagtacaacacggatttattcgacgcgtcaacgattgagcgaatgacagggcactttgtaaccctcctcgagggcgttatcgccaatccacaacagccgatctctcaacttcctattttaactacagtggagcaacagcaacttttagtcgagtggaataacacgcaaaccgactaccccgctgataagtgtatacatcaattattcgaggaacaggtcgagcgcacaccagacgccgttgctgtcgtctttgggaatcagcaactcagctatcgagagatgcgcgaacaagtggttgcactcgccaatttattacgtgagcggggagtcaagccaggagactccgttgccgtggccttaccacgctctgttttcttaacccttgcactacacgcgattgtcgaggcaggtgccgcctggctacctcttgacacaggatatcctgacgatagattaaaaatgatgctcgaggatgcacggccttcccttctgatcacaacagacgatcaattaccccgcttcagtgacgtacctaatctgacctcactctgttacaacgctcccttgacgcctcaagggagcgcccctttacagctgtctcaacctcaccatactgcatatatcatctttacaagtggttctacgggacgccccaagggagtaatggttggtcagactgcgattgtaaatcgtctgttgtggatgcaaaaccactaccctttgacgggggaggacgttgtagcccaaaagactccttgctcgttcgatgtctcagtctgggagttcttttggccatttatagcaggggccaaattagttatggcggagccggaagcccaccgagacccacttgcgatgcagcaattctttgctgagtatggtgtcaccactacacatttcgtcccatcgatgttagcggccttcgtggcttctcttactccacaaacggctaggcaatcttgtgccacactaaagcaagtcttctgctccggcgaggcattacctgcagacttgtgccgggaatggcagcaactcacaggagctccattgcacaatctatacggaccgaccgaggccgcagtagacgtatcttggtatcctgcgtttggcgaggagttagcgcaagtaagaggttcgtcagtaccaataggataccccgtatggaacacggggcttcggatactggacgcgatgatgcatccggtcccaccaggagtcgcgggcgatttatacctgactgggatacagctggcccaaggttacctagggagacctgaccttacggcgtcgaggttcatagcggatccgtttgctccgggtgagcgcatgtaccgtacgggcgacgtcgcgcgatggctagataatggcgccgtagagtatcttggtagatcagacgatcagttaaagatacggggacaacgaatagagcttggggaaatagaccgggtaatgcaggctttgccagatgtcgagcaagcggtggcttcgtgtgctattgcgcgggaggacatacctgggaacaaacaccttgtagcgtacatagttcctcaagaggagcaaacatgcactgagcgatcgaggtccacacttacagtttcgttcgtccggagtttccttaaggagaaactccccgaatatatggtaccgagcgcaatagtgattctagacgctctccccctgactcctaatggaaagctagaccggcgggcgttacccgcccctgacctgcactcacaacttgagacaattattgctgcggctttctcgagcctgctcgggtgcgacgtacaagacgcggatgctgactttttcgcgctaggtggccattcgctgcttgccatgaagctagccgctcagctttcccgacaagtagcgcggcaggtgacaccaggccaagttatggtagcttcgactgtcgcaaagctcgcaacgatcatagacgcggagttagataaatacgtcgctccaaggaacccgatacctggaattggggcgctagttcccgctcccgtggtaatcgcagcaggccgtacggaggaaccaattgccatagtatccatggcttgccggttacccggtggtgtgaataccccacagagactatgggaattattacgtgaagggggagaaaccctcagtggcttccctaccgaccgagggtgggacctcgcgaggttgcatcacccagacccagacaaccccggtacgtcatacgttgataaagggggattcctggacgatgcggcagggtttgacgcagaatttttcggtgtgagccccagagaagcagcggctatggacccgcagcagagattactcctcgaaaccagctgggagttagtcgagaatgcagggattgatccacatagcctaagggggaccgccactggtgtcttcctcggcgttgccaagtttgggtatggcgaggatacggcagctgccgaagacgtcgaggggtactctgtcactggtgtagccccggcagtggcgtcgggcagaattagttacacgatggggttggaagggccgtctatttcggttgataccgcctgttcctccagtctggttgcactccaccttgcagtcgagtcgctccggaaaggagaaagcagtatggccgtggtcgggggagcggcggtgatggccacaccgggtgtgtttgtggatttttcccgacagagagccttggccgcggatgggcgttcaaaggcgttcggagcaggtgcagacgggtttggatttagcgaaggtgtgacactggttctcctagaaagattaagtgaagcccggcgtaacggccatgaggtgctggcagttgttagaggttccgcattaaaccaggacggggcttcgaacgggctgagcgccccctcgggcccggcacagagaagagtgatacgccaagcactcgaatcgtgtggcctagaaccaggtgacgttgacgcggtggaagcgcacgggacaggaactgcgttaggggacccgatagaagcaaacgccttgctggacacttatggtagagatcgtgatgcggatcgacccctctggttaggaagtgttaagtcaaatataggacacactcaggcagcggcgggagtaactgggctgctcaaagtagtcctagccttacgcaatggggaactacccgccaccctacatgtcgaggaaccgacaccgcatgtggattggtcgagcgggggagttgctctcttggcgggtaatcagccgtggcgaagaggtgaacgaacccgtagagccgccgtgtccgcattcgggatcagtggtacgaacgcgcacgtgattgtggaagaagctccacaagaggtgagaccagcgcccggtcaaggactctcgcccgcggtgtcaaccttggtagtggcgggtaaaactatgcagcgtgtttcggcaaccgccggtatgctcgcagattggatggaaggcccaggtgcagatgtggcgctggcggacgtggcgcacacgttaaatcatcaccgttcacggcaaccaaagttcggtacggtggtggccagggaccggacacaggcaatcgccggactaagagcgctggcggcgggtcagcacgccccaggggttgttaaccctgctgaaggaagtccaggtccagggacggtgttcgtgtttcctggccaggggtcccagcgtgcaggcatgggggaggagttggctgcggctttccccgtgtttgccagaatccaccagcaagtgtgggatttactcgatgttcctgatctcgacgttaacgaaacggggtacgcacaaccagcactcttcgcactccaagtggcgctgtttgggctcctcgaatcatggggagtacggccggatgccgtggtcgggcatagtgtaggggaattagcggcagggtacgtttccgggctttggagtcttgaggatgcttgcacgctcgtgtcggcgagagcccgtctaatgcaagccttaccggcaggtggtgttatggcggcagttccagtgtccgaagacgaagcacgggctgtgttgggggaaggagtcgaaatagctgcggtcaacggtccgtcgagcgtggttctaagcggtgatgaagcagcagtgctccaggccgcggaagggttaggcaagtggacgcgattaccgacctcgcatgcattccattctgctcgtatggaaccaatgctggaagagtttagagcagtggcggaaggtctaacatacaggactccccaggtggcaatggccgccggagaccaggttatgaccgctgaatactgggtgcgtcaggttagggatacagttcgttttggcgagcaagttgcctcgttcgaggatgctgtattcgtggaattgggagcagatcgctctcttgcacggctagtcgatggtatcgcgatgttgcacggggatcatgaggcacaggctggtatgcggagagaacaacccttgcccttaggtttacgaagattgctaaccgacctgcataacgctggtgctgccgtcgattttagtgttttgtgcccacaaggtcgtctggttgacgcaccgttaccagcctggtcacaccggtttctcttctatgaccgggaaggagtggacaatagatcaccagggggaagcacagtggcggtccacccgcttttactagccgcggtggatgtgccgggccacggtggagcggttttcacgggtagactctcgactgacgagcaaccgtggttagcggagcacgttgtcgggggaagaaccctagttcctggttctgttttagtcgatctagccttagcggcaggcgaagacgtagggctaccggtgttagaagaattagtattgcagaggccgctggtgcttgccggcgcgggagcactcctacggatgtcggtcggggcaccagacgagagcggtagaagaactatcgatgttcacgcagctgaagacgtcgccgatttagcagatgcccaatggtcccagcacgccaccgggactttagcccaaggggtagcggcggggcccagggacacagagcaatggcccccagaggatgccgtccggattccattagacgaccattatgatggtctcgcggaacagggttatgagtacggtccgtcgtttcaggcgctagtggcctacgtggcggaggatgcgactgcgacaatgttagcggaagtcgcgcttccgggcagcattagatcgcaacaaggtctatacgccatccatcccgcactgctggacgcttgttttcaatctgtcggagcccacccagacagtcaatccgtcgggtcaggtctactcgtacccctcggtgttcggagagttcgtgcgtacgcacccgtaaggaccgcccgttattgttacacccgcgtcacgaaagttgaactagctggggttgaggccgacatcgacgttctggatgctcacggcacagtgcttctagccgtgtgcggtcttcgtatcgggaccggagtgagcgagagggacaaacacaacagagttctcaatgagcgcctactcaccatcgaatggcatcagcgtgaactaccagaaatggacccctcgggtgccgggaagtggctcctaatctcggactgtgcagcatccgatgtcaccgctacacgactggctgatgccttccgggagcacagcgctgcgtgcactaccatgcggtggccacttcacgatgatcaactagcagccgccgaccaactccgggaccaggtgggttcagatgagttttctggcgtggtagtactaacagggccaaacacagggacccctcatcagggttccgcagaccgtggcgccgagtacgttaggcggttagttggaatcgctcgtgaacttagcgatcttcccggagcggttccccgtatgtatgtcgtcacaaggggagcgcagagagtccttgccgatgattgtgttaatttagaacagggagggctcagaggtctgctgaggaccatcggtgctgagcacccacatctccgcgccacccaaattgatgttgatgagcagacaggagtagagcagctggcgcgacaactcctagctacatcggaggaagacgagacagcctggagggacaacgaatggtacgttgcgaggttatgccccacacccctgaggccacaggaacgtaggacaatagtggcggaccatcaacagtctggtatgcggttacaaatacgtacgcccggtgcaatcgatagtgtggcctttgaacccgcacccgatgtagagcaacccttacgggcgggtgaagttcgggttgacgttagagcaaccggtgttaatttccgtgacgttctactcgctctcgggatgtatccccagaaagctgacatggggacagaagcagctggtgttgtaacagcagtgggacctgatgtcgatgcgtttgcgcctggtgatagagttctagggctattccaaggggcatttgctccaattgcggtgactgaccatcgtttactggcacgggtgccagacgggtggtcagatgccgatgcggcggcggtgccaatagcttacacgacagcacattatgcgctgcacgacctggcggggttgcgggcggggcaatctgtcctgatacacgcggcagcgggtggtgttggtatggccgctgttgcactggcacggagggccggcgcagaagttctggctaccgcaggacctgcaaaacacggtacgctacgggcattagggctagatgatgaacacatcgcttcgagtcgggagaccgggttcgcgcgtaagttccgagagcggactgggggacgaggagtggacgtcgttctaaacagcttgaccggcgaactattagacgagtccgcggatctcctcgcggaggacggagtcttcgtggaaatgggaaagactgatctgcgcgatgcaggggactttcgtgggcgctacgccccgtttgatctaggggaagcaggcgatgacaggctcggggaaattctacgtgaggtggtgggactgctcggtgcaggggaactcgaccgactccctgttagcgcgtgggaattggggataccccagacggggaagtcgttagtgacgctgccacccgaacaagcgcaagttttcagaccagacggcactgtattgatcaccgggggaacgggaacgttaggtcggctgctggcccgtcatctggttacagagcacggggtgcgtcacctgctgctagtgtcgaggagaggagcagatgcccctggatcggacgagctgagggccgaaatcgaggatctcggagcatcagcggaaattgcagcatgtgatacagccgatcgagacgctctcagcgcgttgctagatggactgccgaggccactgaccggagtagttcacgccgcgggagtcctcgctgacggtctggttacatccatcgacgagcccgcagtcgaacaagttctccgtgcaaaagttgatgcggcctggaacctgcacgagctaactgcgaacaccggtctcagctttttcgtgctgttctcgtcagccgcaagtgtgttagcggggccggggcagggagtatatgcggcagcgaacgaatctttaaacgctctggccgctctgcgtaggactaggggtttacccgcaaaagcattgggatggggattatgggcgatagggcgtgcaatagcatttgccgagcagaccggtgacgcaatcgccccggaggaaggcgcgtacgccttcgagacactactcagacataacagggcgtactcgggttacgctcccgtgatagggtcaccatggctgactgcgttcgcccaacattcgccctttgcggagaagttccagtccctggggcaaaatagatccgggacgtctaagtttctggcagaattagtcgatctgccaagagaagaatggccagatcggttacgtcgtctattagaactggtgaggtctcatgctgccgcagtttcggggtatggatcggcagaccaattaccagaaagaaaagcattcaaagacctcggattcgattcactggcagcagtcgaactaagaaatcgtctagggaccgcgacaggcgtccggctgcccagtactctggtgttcgaccacccaaccccacttgcggttgcggaacatctacgtgatcgtctaacatccggggaagataaccctatccccctatgtcaaggcgatggggaggagatgagcacatggctacgtcgttttggacccccagtcgaacatcgggccaggctagtgtgtttcccccacgcaggcgcagcggcggattcatacttagacctagcaagagcgttagcaccagagatcgatgttcatgctgttcaataccccggcaggcaagacagaagggacgaggagccattaggaaccgcaggtgaaattgcagatgaagtggcagcggtgctacgtgcgtcgggaggggatgggccttttgcacttttcggccacagtatgggcgccctcatcgcgtacgagacagcaaggcgattagagagggaaccgggagggggacccttacgtttattcgtgagcggacaaacagcgccacgtgtccatgaacgaagaactgatctgcccggtgacgatggactcgtggacgagcttaggcgacttggcacctccgaggcagcgctcgcagacgaagccctgctggctatgtctctcccggtgctcagggcggattatagggtgttaagatcctacgcttgggcggatggtcccccactacgcgccggtataactgccctctgcggtgatgcagacccactaactgcaacaggggatgcggaacgctggttacaacattccgtgattccgggtcggacacggacatttcccggtgggcatttttatttaggggaacaagtgaccgaggtggcaggggctgtccgtagagatttactgagagcagggttagcgggttga

SEQ ID NO: 119 - protein, 3893 aa, Artificial Sequence
  Ac-Ser-MalH
MNPPCGPVRANCVHISIDFPMPVSKVSGPRSRTTSRRTPVRIGAVVVASSTSELLDGLAAVADGRPHASVVRGVARPSAPVVFVFPGQGAQWAGMAGELLGESRVFAAAMDACARAFEPVTDWTLAQVLDSPEQSRRVEVVQPALFAVQTSLAALWRSFGVTPDAVVGHSIGELAAAHVCGAAGAADAARAAALWSREMIPLVGNGDMAAVALSADEIEPRIARWDDDVVLAGVNGPRSVLLTGSPEPVARRVQELSAEGVRAQVINVSMAAHSAQVDDIAEGMRSALAWFAPGGSEVPFYASLTGGAVDTRELVADYWRRSFRLPVRFDEAIRSALEVGPGTFVEASPHPVLAAALQQTLDAEGSSAAVVPTLQRGQGGMRRFLLAAAQAFTGGVAVDWTAAYDDVGPNPALCRSSRRPRRKTSRPSPASTGTRHRTCCERLLAVVNGETAALAGREADAEATFRELGLDSVLAAQLRAKVSAAIGREVNIALLYDHPTPRALAEALAAIQTGASLSIPAIQSRSNRDQHLPLVAAQPGIWMAEKLSELPSAWSVAHYVELTGEVDSPLLARAVVAGLAQADTLRMRFTEDNGEVWQWVDDALTFELPEIIDLRTNIDPHGTAQALMQADLQQDLRVDSGKPLVFHQLIQVADNRWYWYQRYHHLLVDGFSFPAITRQIANIYCTWLRGEPTPASPFTPFADVVEEYQQYRESEAWQRDAAFWAEQRRQLPPPASLSPAPLPGRSASADILRLKLEFTDGEFRQLATQLSGVQRTDLALALAALWLGRLCNRMDYAAGFIFMRRLGSAALTATGPVLNVLPLGIHIGNPSFSELLTRVREVALGAYAHQHIPFEMLVEALQPERNLSHTPLFQVMFVLQNAPASQLELTGITANPIKVKSTTTKFDLTLIMQNTASGLVGVWEYNTDLFDASTIERMTGHFVTLLEGVIANPQQPISQLPILTTVEQQQLLVEWNNTQTDYPADKCIHQLFEEQVERTPDAVAVVFGNQQLSYREMREQVVALANLLRERGVKPGDSVAVALPRSVFLTLALHAIVEAGAAWLPLDTGYPDDRLKMMLEDARPSLLITTDDQLPRFSDVPNLTSLCYNAPLTPQGSAPLQLSQPHHTAYIIFTSGSTGRPKGVMVGQTAIVNRLLWMQNHYPLTGEDVVAQKTPCSFDVSVWEFFWPFIAGAKLVMAEPEAHRDPLAMQQFFAEYGVTTTHFVPSMLAAFVASLTPQTARQSCATLKQVFCSGEALPADLCREWQQLTGAPLHNLYGPTEAAVDVSWYPAFGEELAQVRGSSVPIGYPVWNTGLRILDAMMHPVPPGVAGDLYLTGIQLAQGYLGRPDLTASRFIADPFAPGERMYRTGDVARWLDNGAVEYLGRSDDQLKIRGQRIELGEIDRVMQALPDVEQAVASCAIAREDIPGNKHLVAYIVPQEEQTCTERSRSTLTVSFVRSFLKEKLPEYMVPSAIVILDALPLTPNGKLDRRALPAPDLHSQLETIIAAAFSSLLGCDVQDADADFFALGGHSLLAMKLAAQLSRQVARQVTPGQVMVASTVAKLATIIDAELDKYVAPRNPIPGIGALVPAPVVIAAGRTEEPIAIVSMACRLPGGVNTPQRLWELLREGGETLSGFPTDRGWDLARLHHPDPDNPGTSYVDKGGFLDDAAGFDAEFFGVSPREAAAMDPQQRLLLETSWELVENAGIDPHSLRGTATGVFLGVAKFGYGEDTAAAEDVEGYSVTGVAPAVASGRISYTMGLEGPSISVDTACSSSLVALHLAVESLRKGESSMAVVGGAAVMATPGVFVDFSRQRALAADGRSKAFGAGADGFGFSEGVTLVLLERLSEARRNGHEVLAVVRGSALNQDGASNGLSAPSGPAQRRVIRQALESCGLEPGDVDAVEAHGTGTALGDPIEANALLDTYGRDRDADRPLWLGSVKSNIGHTQAAAGVTGLLKVVLALRNGELPATLHVEEPTPHVDWSSGGVALLAGNQPWRRGERTRRAAVSAFGISGTNAHVIVEEAPQEVRPAPGQGLSPAVSTLVVAGKTMQRVSATAGMLADWMEGPGADVALADVAHTLNHHRSRQPKFGTVVARDRTQAIAGLRALAAGQHAPGVVNPAEGSPGPGTVFVFPGQGSQRAGMGEELAAAFPVFARIHQQVWDLLDVPDLDVNETGYAQPALFALQVALFGLLESWGVRPDAVVGHSVGELAAGYVSGLWSLEDACTLVSARARLMQALPAGGVMAAVPVSEDEARAVLGEGVEIAAVNGPSSVVLSGDEAAVLQAAEGLGKWTRLPTSHAFHSARMEPMLEEFRAVAEGLTYRTPQVAMAAGDQVMTAEYWVRQVRDTVRFGEQVASFEDAVFVELGADRSLARLVDGIAMLHGDHEAQAGMRREQPLPLGLRRLLTDLHNAGAAVDFSVLCPQGRLVDAPLPAWSHRFLFYDREGVDNRSPGGSTVAVHPLLLAAVDVPGHGGAVFTGRLSTDEQPWLAEHVVGGRTLVPGSVLVDLALAAGEDVGLPVLEELVLQRPLVLAGAGALLRMSVGAPDESGRRTIDVHAAEDVADLADAQWSQHATGTLAQGVAAGPRDTEQWPPEDAVRIPLDDHYDGLAEQGYEYGPSFQALVAYVAEDATATMLAEVALPGSIRSQQGLYAIHPALLDACFQSVGAHPDSQSVGSGLLVPLGVRRVRAYAPVRTARYCYTRVTKVELAGVEADIDVLDAHGTVLLAVCGLRIGTGVSERDKHNRVLNERLLTIEWHQRELPEMDPSGAGKWLLISDCAASDVTATRLADAFREHSAACTTMRWPLHDDQLAAADQLRDQVGSDEFSGVVVLTGPNTGTPHQGSADRGAEYVRRLVGIARELSDLPGAVPRMYVVTRGAQRVLADDCVNLEQGGLRGLLRTIGAEHPHLRATQIDVDEQTGVEQLARQLLATSEEDETAWRDNEWYVARLCPTPLRPQERRTIVADHQQSGMRLQIRTPGAIDSVAFEPAPDVEQPLRAGEVRVDVRATGVNFRDVLLALGMYPQKADMGTEAAGVVTAVGPDVDAFAPGDRVLGLFQGAFAPIAVTDHRLLARVPDGWSDADAAAVPIAYTTAHYALHDLAGLRAGQSVLIHAAAGGVGMAAVALARRAGAEVLATAGPAKHGTLRALGLDDEHIASSRETGFARKFRERTGGRGVDVVLNSLTGELLDESADLLAEDGVFVEMGKTDLRDAGDFRGRYAPFDLGEAGDDRLGEILREVVGLLGAGELDRLPVSAWELGIPQTGKSLVTLPPEQAQVFRPDGTVLITGGTGTLGRLLARHLVTEHGVRHLLLVSRRGADAPGSDELRAEIEDLGASAEIAACDTADRDALSALLDGLPRPLTGVVHAAGVLADGLVTSIDEPAVEQVLRAKVDAAWNLHELTANTGLSFFVLFSSAASVLAGPGQGVYAAANESLNALAALRRTRGLPAKALGWGLWAIGRAIAFAEQTGDAIAPEEGAYAFETLLRHNRAYSGYAPVIGSPWLTAFAQHSPFAEKFQSLGQNRSGTSKFLAELVDLPREEWPDRLRRLLELVRSHAAAVSGYGSADQLPERKAFKDLGFDSLAAVELRNRLGTATGVRLPSTLVFDHPTPLAVAEHLRDRLTSGEDNPIPLCQGDGEEMSTWLRRFGPPVEHRARLVCFPHAGAAADSYLDLARALAPEIDVHAVQYPGRQDRRDEEPLGTAGEIADEVAAVLRASGGDGPFALFGHSMGALIAYETARRLEREPGGGPLRLFVSGQTAPRVHERRTDLPGDDGLVDELRRLGTSEAALADEALLAMSLPVLRADYRVLRSYAWADGPPLRAGITALCGDADPLTATGDAERWLQHSVIPGRTRTFPGGHFYLGEQVTEVAGAVRRDLLRAGLAG

SEQ ID NO: 120 - DNA, 11598 bp, Artificial Sequence; identical to SEQ ID NO: 11
  Ile-MalOH-MalOH

SEQ ID NO: 121 - protein, 3865 aa, Artificial Sequence; identical to SEQ ID NO: 43
  Ile-MalOH-MalOH

SEQ ID NO: 122 - DNA, 13251 bp, Artificial Sequence; identical to SEQ ID NO: 10
  Ile-MalOH-MalH

SEQ ID NO: 123 - protein, 4416 aa, Artificial Sequence; identical to SEQ ID NO: 42
  Ile-MalOH-MalH

SEQ ID NO: 124 - DNA, 14904 bp, Artificial Sequence; identical to SEQ ID NO: 6
  Ile-MalH-MalH

SEQ ID NO: 125 - protein, 4967 aa, Artificial Sequence; identical to SEQ ID NO: 38
  Ile-MalH-MalH

SEQ ID NO: 126 - DNA, 13251 bp, Artificial Sequence; identical to SEQ ID NO: 7
  Ile-MalH-MalOH

SEQ ID NO: 127 - protein, 4416 aa, Artificial Sequence; identical to SEQ ID NO: 39
  Ile-MalH-MalOH

SEQ ID NO: 128 - DNA, 10044 bp, Artificial Sequence
  Ac-MalOH-Ser
atgaacccaccctgcgggccagtccgtgcgaattgcgtacacatatccatagatttccccatgccagtttccaaagtttccggtcctcgatcaaggacaaccagccggaggacacccgtccggattggggccgtggtggtggcaagctcgactagcgaactccttgatgggctcgcagcggttgctgatggtaggccacacgccagcgtagttaggggcgttgcgcgcccttctgcgccggttgtattcgttttcccaggtcaaggagcgcaatgggctgggatggcgggggagctactcggggagagtcgggtctttgcagccgctatggacgcctgcgcgagggcgttcgaacctgtaaccgattggacattggcccaagttttggattcaccagagcaatcccggcgtgtagaggtcgtccaacccgccctttttgcagtgcagacctctttggctgcactctggagatctttcggcgtgacacccgacgcagtcgtagggcactctatcggggagcttgcggcggcgcacgtctgtggggcagccggggcagctgacgcggcaagagctgccgcactgtggtcacgagaaatgatcccactagtggggaacggtgacatggcggcggttgcactctcggcagatgagattgaaccacggatcgcccgttgggacgacgacgtcgtgcttgctggtgttaatggtccccgctcggttttactaaccggcagccctgaaccagtagcaagaagggtacaagaactttcggcagagggagttcgggcacaggtcattaatgtgagcatggcggcccattccgcgcaggtggacgatattgcagaagggatgagatcggctctggcgtggtttgccccaggcgggtccgaagttccattttacgccagcctcactgggggagccgtggacacgcgagaactcgttgcggattactggcgacgctcattcagactgcccgttcgtttcgatgaagctataagatcagccctggaagttgggccaggtacattcgtcgaggcctcaccccacccagtcctggcggctgccctacagcagacactggacgcagaggggtcgtcggcagcggtggtccccacattacagcgggggcaaggcggaatgcgtcggttcctcttggcagcggcacaggcattcactggaggagtggccgtcgattggaccgcggcctatgatgatgtggggcctaacccggccctatgtcgatcgtctcggcgcccaagacggaaaacttcgcgaccgtcaccagcttcgacgggaacaagacatagaacttgctgcgaacggctgctcgccgtcgtgaacggcgaaactgccgcattagccggacgtgaagcagatgcagaggcaacctttcgagagcttgggttagattccgttctggcggcccagctcagagctaaagtatccgcggcgataggtcgagaagtcaatattgcactactctatgaccacccaaccccgagagcactcgcagaggcacttgctggcctaccccaggaaattaaacacacgccggcggttcggaccacatccgaagatccaattgccatcgtttcgatggcatgtcgtttaccgggaggagtcaatacgccccaacggctctgggaattactacgggagggtggtgaaaccttgtccgggttcccaacggaccgtggctgggacctagcacggcttcaccaccctgatccggacaaccccggaacgagctacgttgataagggtggatttctcgacgacgcggcgggtttcgacgcagagtttttcggggtttcaccaagggaagctgccgctatggaccctcagcaacgattacttttagagacctcgtgggagctagttgaaaatgcgggcatagatccacatagcctgcgagggacagcgacaggggtgttcctaggagttgcgaagtttggttatggtgaggacacagcagcagcggaagatgttgaaggttattcagttaccggtgttgctcccgctgtggcatctggccgcatatcctacactatgggtttagaaggtccttccatctcggtcgataccgcatgctcaagctcgctagtcgcgcttcatctagccgtagagtccctccgaaagggtgagtcatctatggcggtggtgggtggtgcagccgttatggcgactcctggggtatttgttgatttttcacgccaacgggcgcttgccgcagacggccgttccaaagcgttcggggcaggtgcagatggttttggtttcagcgagggagtcacgctggttctactagagcgtttaagtgaggcgcgtcgtaacggtcatgaagttctagctgtagtgcgcgggtccgcgttaaaccaggacggagcgagcaacggactttcagcaccctccggccctgcgcaacgtagagtaataaggcaagcgctcgaatcgtgtgggcttgaaccgggggatgttgacgcggttgaggcgcatggtactggtacagcactaggtgacccaatagaggccaatgcgctgttggacacttacgggcgagaccgtgatgcggatcgtccactttggttggggtccgttaagagcaatattgggcacactcaagctgcggccggggttacaggactgctgaaggttgtgttagcactgcgcaatggtgagctacctgcaacgttacatgtcgaggaaccaactccacacgtcgattggtcctcaggtggtgtcgcattactggcgggtaatcaaccatggcgaaggggagaaaggaccagaagggcggcagtgagcgcctttggtatctccggtacaaatgctcacgtgatagtggaagaggcgcctcaggaagttcgacccgcccctggccaagggctgtcgccagccgtgtccacgttagttgttgcaggtaaaaccatgcagcgtgtaagtgcgacagctggaatgcttgcagactggatggagggtcctggggccgatgttgcattggcggatgtggcccataccctgaaccatcaccgatcaagacagcccaagttcgggacggttgtagcgcgtgacaggactcaggcgatagctgggctccgtgcattggcggctggtcaacatgctcctggggtcgtcaacccagctgaaggttccccaggaccaggcaccgtgttcgtttttcccggtcaaggttcgcagagggcagggatgggggaggaactcgcggcagcctttcctgtcttcgctcgaatacatcagcaagtttgggacctcctagatgttcccgacctcgacgttaatgaaaccgggtacgcccaaccagcgctgttcgcgcttcaggtcgcgctctttggccttctggagtcgtggggtgttaggccagatgcagtggtagggcactcagttggtgagctggccgcggggtacgtgtccggtctttggtcactagaggacgcctgcacactagtctcagcaagagcgcgcctaatgcaggcactgcctgctggaggggtgatggcggcagtccccgtctccgaggatgaggcgcgggccgtcctgggcgagggagttgaaattgcggctgtgaatggaccctcgtccgttgtgctctcaggggacgaggcggcagtcttacaggccgccgaaggtctaggtaagtggacgcgactgccgaccagccatgcttttcactcagcgagaatggaacccatgctagaagagtttcgggccgtagcagagggtctgacctatcgtacccctcaagtagctatggctgctggggatcaggtgatgacagcagaatattgggtgcggcaggttcgggacacagttcgcttcggggagcaagtagcgtcattcgaggatgcggtgtttgttgagttaggcgctgacagaagtctagcgcgtttggtggacggcatcgccatgctgcacggtgaccacgaagcgcaggccgcggaccataggcaaatcaccgaagcggttgcggatgcttacgtcttaggccaccttccggattttgcggcgctgcggcggcctcacgcacgaaagttggacttaccaacttatcccttcgagcgtagacagtactggttcagagatgcgcgtgagaggccggaacaacccagagataccggcggacctcgcacagaagcagtccgtctgttagaggatggtaggattgaagaattagctgcacttttgggaggggccagtgatgaccaacacacattacaggtgctgactaagttggcggcgcaacataaccaacaacgaacaacccggtcaatcgctgacgacaggtacgaaataaggtgggaccgatcgacttccccactatccggagcagatgttgaccaagcggggagctggatcgtggtgtcagatgacgcagatgccgttcccccgctagtggacttgctggctgcacgtaacgagccccatcaggttgttggtctacccgcttcggacgcagacgaggagaggctcgcagagactctgcgtgcggctgcgactgaagatgctacccttcggatagtccacgttgcggcgctcgaagcaggcgctacccccagcatgcgttcactgctccgcatgcagcaccgaatactaggtggcacgcggcgggtgttcagggcagcggtcgcagcggagttaagaggtcccatttggatagtgacgcggggagcacaaagagtggctgacaccgatacagttgccccgcatcagtcatgcctctggggatttgggagggcagcatcgctggagctgccgcacgtttggggtggcctagcagatttatcagagggcggtgacaatgcggccgatgagtggagtgcgctagtggaccgcattgccgcaccccacggttcagcagttagggaggaccaactggcgctgagagacagggccgtatatacgccaagactggccagacgttctgcgcccccgagcgggactcccctacatctacgaggggatggcacagtgttaataacaggtgggactggtacactaggtaggctattagcgcgtcacctagtaacagagcatggggtgcggcatctcttactagtttcaaggagaggcgccgatgcccctggctcggatgaactgcgcgcagaaatagaggacttaggtgccagcgcggagatcgcagcgtgtgatacagcggatcgcgatgccctatctgccctactagatggtctcccccggccccttacgggtgtcgttcacgccgctggcgtgttagccgatggacttgtcactagcattgacgagcctgcggtggaacaggttctccgagcaaaggtggacgcggcatggaacctacacgaactcacagctaataccgggctatcctttttcgttcttttctcatcagcagcatcggtcctggcaggtccagggcaaggagtttatgcggctgcaaatgaatcgctcaacgcactagctgcgttaaggcgaactaggggtctgccggccaaggctctgggatggggcctgtgggccatcgggcgggcaatcgcttttgcggagcagaccggggacgccatcgctccagaggaaggagcatacgcttttgaaactctgttaaggcataaccgtgcctactcgggatatgcgcccgtcattggatctccctggttgaccgcgttcgcacagcattccccctttgcagaaaaattccaatcactcggacagaatcggtcagggacatcgaaattcttagcggagctagttgacctgcctcgtgaggaatggccggataggctcaggagactactagagttagttaggtcccatgccgccgcggtctccggttacggtagtgcagatcaactgccggaaagaaaagcgttcaaggatttggggtttgattcgctggccgccgttgaactgcgtaaccggctgggaacggctacaggggtacgactgccgtcaaccctagtatttgatcacccaactccgctggccgtcgctgagcacttaagagataggctattggcttccgctcgtgctccgcgtgacgtccgccaaacagctcacgctgacgctgctgaaccggctggcgacgacggccttcagcacttgcccttagtagctgcgcaacctggaatatggatggccgagaagttatctgaactaccatcagcgtggagcgtagcgcattacgtggagctcactggtgaggttgactcgcctcttttggccagggcggtagtggctggccttgcacaagctgacaccttaagaatgcgtttcacagaggataatggggaagtttggcaatgggtagacgatgcgttaacatttgagttaccggaaatcatagacctgcgcactaacatagaccctcacgggacagctcaggccttgatgcaagcggacctgcaacaggacctacgtgtggattcggggaagcctctggtcttccatcagctaattcaagtagcggacaatcgctggtactggtatcaaaggtaccaccacttgcttgtggacgggttcagttttccagcgataaccaggcaaatagccaacatttattgcacttggttgcgaggagagcctacgcccgcatcccccttcacgccattcgcagacgttgttgaggaataccaacagtatcgcgagagcgaagcgtggcaacgcgatgcggcattctgggcggagcaacgacggcaactaccgcctcccgcatccctatcacctgccccgctccccggccggtccgcgtcagccgacattctacggctaaagctggagttcacagatggtgaatttcgacagcttgctacacaactcagcggggtacaaaggacagacctagcgctcgctctggctgcattatggctaggacgactttgcaatcgaatggactacgcggcgggtttcatatttatgcgccggctcggcagcgcagcgttgaccgcaacgggtccagttttaaatgttcttcctttgggaatccacataggcaacccaagcttctctgagcttctcaccagggttcgcgaggtcgccttaggcgcgtatgcacaccaacatattccttttgagatgttagtagaggcactgcaaccagagcgaaaccttagccatactcctctcttccaagtgatgtttgtccttcagaatgcgcccgcgtcccaattagagttaaccgggatcaccgcaaacccaattaaggttaaatcaactaccacgaagttcgacctaactttaatcatgcaaaacacagctagcggattagtaggtgtttgggagtacaacacggatttattcgacgcgtcaacgattgagcgaatgacagggcactttgtaaccctcctcgagggcgttatcgccaatccacaacagccgatctctcaacttcctattttaactacagtggagcaacagcaacttttagtcgagtggaataacacgcaaaccgactaccccgctgataagtgtatacatcaattattcgaggaacaggtcgagcgcacaccagacgccgttgctgtcgtctttgggaatcagcaactcagctatcgagagatgcgcgaacaagtggttgcactcgccaatttattacgtgagcggggagtcaagccaggagactccgttgccgtggccttaccacgctctgttttcttaacccttgcactacacgcgattgtcgaggcaggtgccgcctggctacctcttgacacaggatatcctgacgatagattaaaaatgatgctcgaggatgcacggccttcccttctgatcacaacagacgatcaattaccccgcttcagtgacgtacctaatctgacctcactctgttacaacgctcccttgacgcctcaagggagcgcccctttacagctgtctcaacctcaccatactgcatatatcatctttacaagtggttctacgggacgccccaagggagtaatggttggtcagactgcgattgtaaatcgtctgttgtggatgcaaaaccactaccctttgacgggggaggacgttgtagcccaaaagactccttgctcgttcgatgtctcagtctgggagttcttttggccatttatagcaggggccaaattagttatggcggagccggaagcccaccgagacccacttgcgatgcagcaattctttgctgagtatggtgtcaccactacacatttcgtcccatcgatgttagcggccttcgtggcttctcttactccacaaacggctaggcaatcttgtgccacactaaagcaagtcttctgctccggcgaggcattacctgcagacttgtgccgggaatggcagcaactcacaggagctccattgcacaatctatacggaccgaccgaggccgcagtagacgtatcttggtatcctgcgtttggcgaggagttagcgcaagtaagaggttcgtcagtaccaataggataccccgtatggaacacggggcttcggatactggacgcgatgatgcatccggtcccaccaggagtcgcgggcgatttatacctgactgggatacagctggcccaaggttacctagggagacctgaccttacggcgtcgaggttcatagcggatccgtttgctccgggtgagcgcatgtaccgtacgggcgacgtcgcgcgatggctagataatggcgccgtagagtatcttggtagatcagacgatcagttaaagatacggggacaacgaatagagcttggggaaatagaccgggtaatgcaggctttgccagatgtcgagcaagcggtggcttcgtgtgctattgcgcgggaggacatacctgggaacaaacaccttgtagcgtacatagttcctcaagaggagcaaacatgcactgagcgatcgaggtccacacttacagtttcgttcgtccggagtttccttaaggagaaactccccgaatatatggtaccgagcgcaatagtgattctagacgctctccccctgactcctaatggaaagctagaccggcgggcgttacccgcccctgacctgcactcacaacttgagacaattattgctgcggctttctcgagcctgctcgggtgcgacgtacaagacgcggatgctgactttttcgcgctaggtggccattcgctgcttgccatgaagctagccgctcagctttcccgacaagtagcgcggcaggtgacaccaggccaagttatggtagcttcgactgtcgcaaagctcgcaacgatcatagacgcggagttagataaatacgtcgctccaaggaacccgataacatccggggaagataaccctatccccctatgtcaaggcgatggggaggagatgagcacatggctacgtcgttttggacccccagtcgaacatcgggccaggctagtgtgtttcccccacgcaggcgcagcggcggattcatacttagacctagcaagagcgttagcaccagagatcgatgttcatgctgttcaataccccggcaggcaagacagaagggacgaggagccattaggaaccgcaggtgaaattgcagatgaagtggcagcggtgctacgtgcgtcgggaggggatgggccttttgcacttttcggccacagtatgggcgccctcatcgcgtacgagacagcaaggcgattagagagggaaccgggagggggacccttacgtttattcgtgagcggacaaacagcgccacgtgtccatgaacgaagaactgatctgcccggtgacgatggactcgtggacgagcttaggcgacttggcacctccgaggcagcgctcgcagacgaagccctgctggctatgtctctcccggtgctcagggcggattatagggtgttaagatcctacgcttgggcggatggtcccccactacgcgccggtataactgccctctgcggtgatgcagacccactaactgcaacaggggatgcggaacgctggttacaacattccgtgattccgggtcggacacggacatttcccggtgggcatttttatttaggggaacaagtgaccgaggtggcaggggctgtccgtagagatttactgagagcagggttagcgggttga

SEQ ID NO: 129 - protein, 3347 aa, Artificial Sequence
  Ac-MalOH-Ser
MNPPCGPVRANCVHISIDFPMPVSKVSGPRSRTTSRRTPVRIGAVVVASSTSELLDGLAAVADGRPHASVVRGVARPSAPVVFVFPGQGAQWAGMAGELLGESRVFAAAMDACARAFEPVTDWTLAQVLDSPEQSRRVEVVQPALFAVQTSLAALWRSFGVTPDAVVGHSIGELAAAHVCGAAGAADAARAAALWSREMIPLVGNGDMAAVALSADEIEPRIARWDDDVVLAGVNGPRSVLLTGSPEPVARRVQELSAEGVRAQVINVSMAAHSAQVDDIAEGMRSALAWFAPGGSEVPFYASLTGGAVDTRELVADYWRRSFRLPVRFDEAIRSALEVGPGTFVEASPHPVLAAALQQTLDAEGSSAAVVPTLQRGQGGMRRFLLAAAQAFTGGVAVDWTAAYDDVGPNPALCRSSRRPRRKTSRPSPASTGTRHRTCCERLLAVVNGETAALAGREADAEATFRELGLDSVLAAQLRAKVSAAIGREVNIALLYDHPTPRALAEALAGLPQEIKHTPAVRTTSEDPIAIVSMACRLPGGVNTPQRLWELLREGGETLSGFPTDRGWDLARLHHPDPDNPGTSYVDKGGFLDDAAGFDAEFFGVSPREAAAMDPQQRLLLETSWELVENAGIDPHSLRGTATGVFLGVAKFGYGEDTAAAEDVEGYSVTGVAPAVASGRISYTMGLEGPSISVDTACSSSLVALHLAVESLRKGESSMAVVGGAAVMATPGVFVDFSRQRALAADGRSKAFGAGADGFGFSEGVTLVLLERLSEARRNGHEVLAVVRGSALNQDGASNGLSAPSGPAQRRVIRQALESCGLEPGDVDAVEAHGTGTALGDPIEANALLDTYGRDRDADRPLWLGSVKSNIGHTQAAAGVTGLLKVVLALRNGELPATLHVEEPTPHVDWSSGGVALLAGNQPWRRGERTRRAAVSAFGISGTNAHVIVEEAPQEVRPAPGQGLSPAVSTLVVAGKTMQRVSATAGMLADWMEGPGADVALADVAHTLNHHRSRQPKFGTVVARDRTQAIAGLRALAAGQHAPGVVNPAEGSPGPGTVFVFPGQGSQRAGMGEELAAAFPVFARIHQQVWDLLDVPDLDVNETGYAQPALFALQVALFGLLESWGVRPDAVVGHSVGELAAGYVSGLWSLEDACTLVSARARLMQALPAGGVMAAVPVSEDEARAVLGEGVEIAAVNGPSSVVLSGDEAAVLQAAEGLGKWTRLPTSHAFHSARMEPMLEEFRAVAEGLTYRTPQVAMAAGDQVMTAEYWVRQVRDTVRFGEQVASFEDAVFVELGADRSLARLVDGIAMLHGDHEAQAADHRQITEAVADAYVLGHLPDFAALRRPHARKLDLPTYPFERRQYWFRDARERPEQPRDTGGPRTEAVRLLEDGRIEELAALLGGASDDQHTLQVLTKLAAQHNQQRTTRSIADDRYEIRWDRSTSPLSGADVDQAGSWIVVSDDADAVPPLVDLLAARNEPHQVVGLPASDADEERLAETLRAAATEDATLRIVHVAALEAGATPSMRSLLRMQHRILGGTRRVFRAAVAAELRGPIWIVTRGAQRVADTDTVAPHQSCLWGFGRAASLELPHVWGGLADLSEGGDNAADEWSALVDRIAAPHGSAVREDQLALRDRAVYTPRLARRSAPPSGTPLHLRGDGTVLITGGTGTLGRLLARHLVTEHGVRHLLLVSRRGADAPGSDELRAEIEDLGASAEIAACDTADRDALSALLDGLPRPLTGVVHAAGVLADGLVTSIDEPAVEQVLRAKVDAAWNLHELTANTGLSFFVLFSSAASVLAGPGQGVYAAANESLNALAALRRTRGLPAKALGWGLWAIGRAIAFAEQTGDAIAPEEGAYAFETLLRHNRAYSGYAPVIGSPWLTAFAQHSPFAEKFQSLGQNRSGTSKFLAELVDLPREEWPDRLRRLLELVRSHAAAVSGYGSADQLPERKAFKDLGFDSLAAVELRNRLGTATGVRLPSTLVFDHPTPLAVAEHLRDRLLASARAPRDVRQTAHADAAEPAGDDGLQHLPLVAAQPGIWMAEKLSELPSAWSVAHYVELTGEVDSPLLARAVVAGLAQADTLRMRFTEDNGEVWQWVDDALTFELPEIIDLRTNIDPHGTAQALMQADLQQDLRVDSGKPLVFHQLIQVADNRWYWYQRYHHLLVDGFSFPAITRQIANIYCTWLRGEPTPASPFTPFADVVEEYQQYRESEAWQRDAAFWAEQRRQLPPPASLSPAPLPGRSASADILRLKLEFTDGEFRQLATQLSGVQRTDLALALAALWLGRLCNRMDYAAGFIFMRRLGSAALTATGPVLNVLPLGIHIGNPSFSELLTRVREVALGAYAHQHIPFEMLVEALQPERNLSHTPLFQVMFVLQNAPASQLELTGITANPIKVKSTTTKFDLTLIMQNTASGLVGVWEYNTDLFDASTIERMTGHFVTLLEGVIANPQQPISQLPILTTVEQQQLLVEWNNTQTDYPADKCIHQLFEEQVERTPDAVAVVFGNQQLSYREMREQVVALANLLRERGVKPGDSVAVALPRSVFLTLALHAIVEAGAAWLPLDTGYPDDRLKMMLEDARPSLLITTDDQLPRFSDVPNLTSLCYNAPLTPQGSAPLQLSQPHHTAYIIFTSGSTGRPKGVMVGQTAIVNRLLWMQNHYPLTGEDVVAQKTPCSFDVSVWEFFWPFIAGAKLVMAEPEAHRDPLAMQQFFAEYGVTTTHFVPSMLAAFVASLTPQTARQSCATLKQVFCSGEALPADLCREWQQLTGAPLHNLYGPTEAAVDVSWYPAFGEELAQVRGSSVPIGYPVWNTGLRILDAMMHPVPPGVAGDLYLTGIQLAQGYLGRPDLTASRFIADPFAPGERMYRTGDVARWLDNGAVEYLGRSDDQLKIRGQRIELGEIDRVMQALPDVEQAVASCAIAREDIPGNKHLVAYIVPQEEQTCTERSRSTLTVSFVRSFLKEKLPEYMVPSAIVILDALPLTPNGKLDRRALPAPDLHSQLETIIAAAFSSLLGCDVQDADADFFALGGHSLLAMKLAAQLSRQVARQVTPGQVMVASTVAKLATIIDAELDKYVAPRNPITSGEDNPIPLCQGDGEEMSTWLRRFGPPVEHRARLVCFPHAGAAADSYLDLARALAPEIDVHAVQYPGRQDRRDEEPLGTAGEIADEVAAVLRASGGDGPFALFGHSMGALIAYETARRLEREPGGGPLRLFVSGQTAPRVHERRTDLPGDDGLVDELRRLGTSEAALADEALLAMSLPVLRADYRVLRSYAWADGPPLRAGITALCGDADPLTATGDAERWLQHSVIPGRTRTFPGGHFYLGEQVTEVAGAVRRDLLRAGLAG

SEQ ID NO: 130 - DNA, 11697 bp, Artificial Sequence
  Ac-MalH-Ser
atgaacccaccctgcgggccagtccgtgcgaattgcgtacacatatccatagatttccccatgccagtttccaaagtttccggtcctcgatcaaggacaaccagccggaggacacccgtccggattggggccgtggtggtggcaagctcgactagcgaactccttgatgggctcgcagcggttgctgatggtaggccacacgccagcgtagttaggggcgttgcgcgcccttctgcgccggttgtattcgttttcccaggtcaaggagcgcaatgggctgggatggcgggggagctactcggggagagtcgggtctttgcagccgctatggacgcctgcgcgagggcgttcgaacctgtaaccgattggacattggcccaagttttggattcaccagagcaatcccggcgtgtagaggtcgtccaacccgccctttttgcagtgcagacctctttggctgcactctggagatctttcggcgtgacacccgacgcagtcgtagggcactctatcggggagcttgcggcggcgcacgtctgtggggcagccggggcagctgacgcggcaagagctgccgcactgtggtcacgagaaatgatcccactagtggggaacggtgacatggcggcggttgcactctcggcagatgagattgaaccacggatcgcccgttgggacgacgacgtcgtgcttgctggtgttaatggtccccgctcggttttactaaccggcagccctgaaccagtagcaagaagggtacaagaactttcggcagagggagttcgggcacaggtcattaatgtgagcatggcggcccattccgcgcaggtggacgatattgcagaagggatgagatcggctctggcgtggtttgccccaggcgggtccgaagttccattttacgccagcctcactgggggagccgtggacacgcgagaactcgttgcggattactggcgacgctcattcagactgcccgttcgtttcgatgaagctataagatcagccctggaagttgggccaggtacattcgtcgaggcctcaccccacccagtcctggcggctgccctacagcagacactggacgcagaggggtcgtcggcagcggtggtccccacattacagcgggggcaaggcggaatgcgtcggttcctcttggcagcggcacaggcattcactggaggagtggccgtcgattggaccgcggcctatgatgatgtggggcctaacccggccctatgtcgatcgtctcggcgcccaagacggaaaacttcgcgaccgtcaccagcttcgacgggaacaagacatagaacttgctgcgaacggctgctcgccgtcgtgaacggcgaaactgccgcattagccggacgtgaagcagatgcagaggcaacctttcgagagcttgggttagattccgttctggcggcccagctcagagctaaagtatccgcggcgataggtcgagaagtcaatattgcactactctatgaccacccaaccccgagagcactcgcagaggcacttgctggcctaccccaggaaattaaacacacgccggcggttcggaccacatccgaagatccaattgccatagtatccatggcttgccggttacccggtggtgtgaataccccacagagactatgggaattattacgtgaagggggagaaaccctcagtggcttccctaccgaccgagggtgggacctcgcgaggttgcatcacccagacccagacaaccccggtacgtcatacgttgataaagggggattcctggacgatgcggcagggtttgacgcagaatttttcggtgtgagccccagagaagcagcggctatggacccgcagcagagattactcctcgaaaccagctgggagttagtcgagaatgcagggattgatccacatagcctaagggggaccgccactggtgtcttcctcggcgttgccaagtttgggtatggcgaggatacggcagctgccgaagacgtcgaggggtactctgtcactggtgtagccccggcagtggcgtcgggcagaattagttacacgatggggttggaagggccgtctatttcggttgataccgcctgttcctccagtctggttgcactccaccttgcagtcgagtcgctccggaaaggagaaagcagtatggccgtggtcgggggagcggcggtgatggccacaccgggtgtgtttgtggatttttcccgacagagagccttggccgcggatgggcgttcaaaggcgttcggagcaggtgcagacgggtttggatttagcgaaggtgtgacactggttctcctagaaagattaagtgaagcccggcgtaacggccatgaggtgctggcagttgttagaggttccgcattaaaccaggacggggcttcgaacgggctgagcgccccctcgggcccggcacagagaagagtgatacgccaagcactcgaatcgtgtggcctagaaccaggtgacgttgacgcggtggaagcgcacgggacaggaactgcgttaggggacccgatagaagcaaacgccttgctggacacttatggtagagatcgtgatgcggatcgacccctctggttaggaagtgttaagtcaaatataggacacactcaggcagcggcgggagtaactgggctgctcaaagtagtcctagccttacgcaatggggaactacccgccaccctacatgtcgaggaaccgacaccgcatgtggattggtcgagcgggggagttgctctcttggcgggtaatcagccgtggcgaagaggtgaacgaacccgtagagccgccgtgtccgcattcgggatcagtggtacgaacgcgcacgtgattgtggaagaagctccacaagaggtgagaccagcgcccggtcaaggactctcgcccgcggtgtcaaccttggtagtggcgggtaaaactatgcagcgtgtttcggcaaccgccggtatgctcgcagattggatggaaggcccaggtgcagatgtggcgctggcggacgtggcgcacacgttaaatcatcaccgttcacggcaaccaaagttcggtacggtggtggccagggaccggacacaggcaatcgccggactaagagcgctggcggcgggtcagcacgccccaggggttgttaaccctgctgaaggaagtccaggtccagggacggtgttcgtgtttcctggccaggggtcccagcgtgcaggcatgggggaggagttggctgcggctttccccgtgtttgccagaatccaccagcaagtgtgggatttactcgatgttcctgatctcgacgttaacgaaacggggtacgcacaaccagcactcttcgcactccaagtggcgctgtttgggctcctcgaatcatggggagtacggccggatgccgtggtcgggcatagtgtaggggaattagcggcagggtacgtttccgggctttggagtcttgaggatgcttgcacgctcgtgtcggcgagagcccgtctaatgcaagccttaccggcaggtggtgttatggcggcagttccagtgtccgaagacgaagcacgggctgtgttgggggaaggagtcgaaatagctgcggtcaacggtccgtcgagcgtggttctaagcggtgatgaagcagcagtgctccaggccgcggaagggttaggcaagtggacgcgattaccgacctcgcatgcattccattctgctcgtatggaaccaatgctggaagagtttagagcagtggcggaaggtctaacatacaggactccccaggtggcaatggccgccggagaccaggttatgaccgctgaatactgggtgcgtcaggttagggatacagttcgttttggcgagcaagttgcctcgttcgaggatgctgtattcgtggaattgggagcagatcgctctcttgcacggctagtcgatggtatcgcgatgttgcacggggatcatgaggcacaggctggtatgcggagagaacaacccttgcccttaggtttacgaagattgctaaccgacctgcataacgctggtgctgccgtcgattttagtgttttgtgcccacaaggtcgtctggttgacgcaccgttaccagcctggtcacaccggtttctcttctatgaccgggaaggagtggacaatagatcaccagggggaagcacagtggcggtccacccgcttttactagccgcggtggatgtgccgggccacggtggagcggttttcacgggtagactctcgactgacgagcaaccgtggttagcggagcacgttgtcgggggaagaaccctagttcctggttctgttttagtcgatctagccttagcggcaggcgaagacgtagggctaccggtgttagaagaattagtattgcagaggccgctggtgcttgccggcgcgggagcactcctacggatgtcggtcggggcaccagacgagagcggtagaagaactatcgatgttcacgcagctgaagacgtcgccgatttagcagatgcccaatggtcccagcacgccaccgggactttagcccaaggggtagcggcggggcccagggacacagagcaatggcccccagaggatgccgtccggattccattagacgaccattatgatggtctcgcggaacagggttatgagtacggtccgtcgtttcaggcgctagtggcctacgtggcggaggatgcgactgcgacaatgttagcggaagtcgcgcttccgggcagcattagatcgcaacaaggtctatacgccatccatcccgcactgctggacgcttgttttcaatctgtcggagcccacccagacagtcaatccgtcgggtcaggtctactcgtacccctcggtgttcggagagttcgtgcgtacgcacccgtaaggaccgcccgttattgttacacccgcgtcacgaaagttgaactagctggggttgaggccgacatcgacgttctggatgctcacggcacagtgcttctagccgtgtgcggtcttcgtatcgggaccggagtgagcgagagggacaaacacaacagagttctcaatgagcgcctactcaccatcgaatggcatcagcgtgaactaccagaaatggacccctcgggtgccgggaagtggctcctaatctcggactgtgcagcatccgatgtcaccgctacacgactggctgatgccttccgggagcacagcgctgcgtgcactaccatgcggtggccacttcacgatgatcaactagcagccgccgaccaactccgggaccaggtgggttcagatgagttttctggcgtggtagtactaacagggccaaacacagggacccctcatcagggttccgcagaccgtggcgccgagtacgttaggcggttagttggaatcgctcgtgaacttagcgatcttcccggagcggttccccgtatgtatgtcgtcacaaggggagcgcagagagtccttgccgatgattgtgttaatttagaacagggagggctcagaggtctgctgaggaccatcggtgctgagcacccacatctccgcgccacccaaattgatgttgatgagcagacaggagtagagcagctggcgcgacaactcctagctacatcggaggaagacgagacagcctggagggacaacgaatggtacgttgcgaggttatgccccacacccctgaggccacaggaacgtaggacaatagtggcggaccatcaacagtctggtatgcggttacaaatacgtacgcccggtgcaatcgatagtgtggcctttgaacccgcacccgatgtagagcaacccttacgggcgggtgaagttcgggttgacgttagagcaaccggtgttaatttccgtgacgttctactcgctctcgggatgtatccccagaaagctgacatggggacagaagcagctggtgttgtaacagcagtgggacctgatgtcgatgcgtttgcgcctggtgatagagttctagggctattccaaggggcatttgctccaattgcggtgactgaccatcgtttactggcacgggtgccagacgggtggtcagatgccgatgcggcggcggtgccaatagcttacacgacagcacattatgcgctgcacgacctggcggggttgcgggcggggcaatctgtcctgatacacgcggcagcgggtggtgttggtatggccgctgttgcactggcacggagggccggcgcagaagttctggctaccgcaggacctgcaaaacacggtacgctacgggcattagggctagatgatgaacacatcgcttcgagtcgggagaccgggttcgcgcgtaagttccgagagcggactgggggacgaggagtggacgtcgttctaaacagcttgaccggcgaactattagacgagtccgcggatctcctcgcggaggacggagtcttcgtggaaatgggaaagactgatctgcgcgatgcaggggactttcgtgggcgctacgccccgtttgatctaggggaagcaggcgatgacaggctcggggaaattctacgtgaggtggtgggactgctcggtgcaggggaactcgaccgactccctgttagcgcgtgggaattggggataccccagacggggaagtcgttagtgacgctgccacccgaacaagcgcaagttttcagaccagacggcactgtattgatcaccgggggaacgggaacgttaggtcggctgctggcccgtcatctggttacagagcacggggtgcgtcacctgctgctagtgtcgaggagaggagcagatgcccctggatcggacgagctgagggccgaaatcgaggatctcggagcatcagcggaaattgcagcatgtgatacagccgatcgagacgctctcagcgcgttgctagatggactgccgaggccactgaccggagtagttcacgccgcgggagtcctcgctgacggtctggttacatccatcgacgagcccgcagtcgaacaagttctccgtgcaaaagttgatgcggcctggaacctgcacgagctaactgcgaacaccggtctcagctttttcgtgctgttctcgtcagccgcaagtgtgttagcggggccggggcagggagtatatgcggcagcgaacgaatctttaaacgctctggccgctctgcgtaggactaggggtttacccgcaaaagcattgggatggggattatgggcgatagggcgtgcaatagcatttgccgagcagaccggtgacgcaatcgccccggaggaaggcgcgtacgccttcgagacactactcagacataacagggcgtactcgggttacgctcccgtgatagggtcaccatggctgactgcgttcgcccaacattcgccctttgcggagaagttccagtccctggggcaaaatagatccgggacgtctaagtttctggcagaattagtcgatctgccaagagaagaatggccagatcggttacgtcgtctattagaactggtgaggtctcatgctgccgcagtttcggggtatggatcggcagaccaattaccagaaagaaaagcattcaaagacctcggattcgattcactggcagcagtcgaactaagaaatcgtctagggaccgcgacaggcgtccggctgcccagtactctggtgttcgaccacccaaccccacttgcggttgcggaacatctacgtgatcgtctattggcttccgctcgtgctccgcgtgacgtccgccaaacagctcacgctgacgctgctgaaccggctggcgacgacggccttcagcacttgcccttagtagctgcgcaacctggaatatggatggccgagaagttatctgaactaccatcagcgtggagcgtagcgcattacgtggagctcactggtgaggttgactcgcctcttttggccagggcggtagtggctggccttgcacaagctgacaccttaagaatgcgtttcacagaggataatggggaagtttggcaatgggtagacgatgcgttaacatttgagttaccggaaatcatagacctgcgcactaacatagaccctcacgggacagctcaggccttgatgcaagcggacctgcaacaggacctacgtgtggattcggggaagcctctggtcttccatcagctaattcaagtagcggacaatcgctggtactggtatcaaaggtaccaccacttgcttgtggacgggttcagttttccagcgataaccaggcaaatagccaacatttattgcacttggttgcgaggagagcctacgcccgcatcccccttcacgccattcgcagacgttgttgaggaataccaacagtatcgcgagagcgaagcgtggcaacgcgatgcggcattctgggcggagcaacgacggcaactaccgcctcccgcatccctatcacctgccccgctccccggccggtccgcgtcagccgacattctacggctaaagctggagttcacagatggtgaatttcgacagcttgctacacaactcagcggggtacaaaggacagacctagcgctcgctctggctgcattatggctaggacgactttgcaatcgaatggactacgcggcgggtttcatatttatgcgccggctcggcagcgcagcgttgaccgcaacgggtccagttttaaatgttcttcctttgggaatccacataggcaacccaagcttctctgagcttctcaccagggttcgcgaggtcgccttaggcgcgtatgcacaccaacatattccttttgagatgttagtagaggcactgcaaccagagcgaaaccttagccatactcctctcttccaagtgatgtttgtccttcagaatgcgcccgcgtcccaattagagttaaccgggatcaccgcaaacccaattaaggttaaatcaactaccacgaagttcgacctaactttaatcatgcaaaacacagctagcggattagtaggtgtttgggagtacaacacggatttattcgacgcgtcaacgattgagcgaatgacagggcactttgtaaccctcctcgagggcgttatcgccaatccacaacagccgatctctcaacttcctattttaactacagtggagcaacagcaacttttagtcgagtggaataacacgcaaaccgactaccccgctgataagtgtatacatcaattattcgaggaacaggtcgagcgcacaccagacgccgttgctgtcgtctttgggaatcagcaactcagctatcgagagatgcgcgaacaagtggttgcactcgccaatttattacgtgagcggggagtcaagccaggagactccgttgccgtggccttaccacgctctgttttcttaacccttgcactacacgcgattgtcgaggcaggtgccgcctggctacctcttgacacaggatatcctgacgatagattaaaaatgatgctcgaggatgcacggccttcccttctgatcacaacagacgatcaattaccccgcttcagtgacgtacctaatctgacctcactctgttacaacgctcccttgacgcctcaagggagcgcccctttacagctgtctcaacctcaccatactgcatatatcatctttacaagtggttctacgggacgccccaagggagtaatggttggtcagactgcgattgtaaatcgtctgttgtggatgcaaaaccactaccctttgacgggggaggacgttgtagcccaaaagactccttgctcgttcgatgtctcagtctgggagttcttttggccatttatagcaggggccaaattagttatggcggagccggaagcccaccgagacccacttgcgatgcagcaattctttgctgagtatggtgtcaccactacacatttcgtcccatcgatgttagcggccttcgtggcttctcttactccacaaacggctaggcaatcttgtgccacactaaagcaagtcttctgctccggcgaggcattacctgcagacttgtgccgggaatggcagcaactcacaggagctccattgcacaatctatacggaccgaccgaggccgcagtagacgtatcttggtatcctgcgtttggcgaggagttagcgcaagtaagaggttcgtcagtaccaataggataccccgtatggaacacggggcttcggatactggacgcgatgatgcatccggtcccaccaggagtcgcgggcgatttatacctgactgggatacagctggcccaaggttacctagggagacctgaccttacggcgtcgaggttcatagcggatccgtttgctccgggtgagcgcatgtaccgtacgggcgacgtcgcgcgatggctagataatggcgccgtagagtatcttggtagatcagacgatcagttaaagatacggggacaacgaatagagcttggggaaatagaccgggtaatgcaggctttgccagatgtcgagcaagcggtggcttcgtgtgctattgcgcgggaggacatacctgggaacaaacaccttgtagcgtacatagttcctcaagaggagcaaacatgcactgagcgatcgaggtccacacttacagtttcgttcgtccggagtttccttaaggagaaactccccgaatatatggtaccgagcgcaatagtgattctagacgctctccccctgactcctaatggaaagctagaccggcgggcgttacccgcccctgacctgcactcacaacttgagacaattattgctgcggctttctcgagcctgctcgggtgcgacgtacaagacgcggatgctgactttttcgcgctaggtggccattcgctgcttgccatgaagctagccgctcagctttcccgacaagtagcgcggcaggtgacaccaggccaagttatggtagcttcgactgtcgcaaagctcgcaacgatcatagacgcggagttagataaatacgtcgctccaaggaacccgataacatccggggaagataaccctatccccctatgtcaaggcgatggggaggagatgagcacatggctacgtcgttttggacccccagtcgaacatcgggccaggctagtgtgtttcccccacgcaggcgcagcggcggattcatacttagacctagcaagagcgttagcaccagagatcgatgttcatgctgttcaataccccggcaggcaagacagaagggacgaggagccattaggaaccgcaggtgaaattgcagatgaagtggcagcggtgctacgtgcgtcgggaggggatgggccttttgcacttttcggccacagtatgggcgccctcatcgcgtacgagacagcaaggcgattagagagggaaccgggagggggacccttacgtttattcgtgagcggacaaacagcgccacgtgtccatgaacgaagaactgatctgcccggtgacgatggactcgtggacgagcttaggcgacttggcacctccgaggcagcgctcgcagacgaagccctgctggctatgtctctcccggtgctcagggcggattatagggtgttaagatcctacgcttgggcggatggtcccccactacgcgccggtataactgccctctgcggtgatgcagacccactaactgcaacaggggatgcggaacgctggttacaacattccgtgattccgggtcggacacggacatttcccggtgggcatttttatttaggggaacaagtgaccgaggtggcaggggctgtccgtagagatttactgagagcagggttagcgggttga

SEQ ID NO: 131 - protein, 3898 aa, Artificial Sequence
  Ac-MalH-Ser
MNPPCGPVRANCVHISIDFPMPVSKVSGPRSRTTSRRTPVRIGAVVVASSTSELLDGLAAVADGRPHASVVRGVARPSAPVVFVFPGQGAQWAGMAGELLGESRVFAAAMDACARAFEPVTDWTLAQVLDSPEQSRRVEVVQPALFAVQTSLAALWRSFGVTPDAVVGHSIGELAAAHVCGAAGAADAARAAALWSREMIPLVGNGDMAAVALSADEIEPRIARWDDDVVLAGVNGPRSVLLTGSPEPVARRVQELSAEGVRAQVINVSMAAHSAQVDDIAEGMRSALAWFAPGGSEVPFYASLTGGAVDTRELVADYWRRSFRLPVRFDEAIRSALEVGPGTFVEASPHPVLAAALQQTLDAEGSSAAVVPTLQRGQGGMRRFLLAAAQAFTGGVAVDWTAAYDDVGPNPALCRSSRRPRRKTSRPSPASTGTRHRTCCERLLAVVNGETAALAGREADAEATFRELGLDSVLAAQLRAKVSAAIGREVNIALLYDHPTPRALAEALAGLPQEIKHTPAVRTTSEDPIAIVSMACRLPGGVNTPQRLWELLREGGETLSGFPTDRGWDLARLHHPDPDNPGTSYVDKGGFLDDAAGFDAEFFGVSPREAAAMDPQQRLLLETSWELVENAGIDPHSLRGTATGVFLGVAKFGYGEDTAAAEDVEGYSVTGVAPAVASGRISYTMGLEGPSISVDTACSSSLVALHLAVESLRKGESSMAVVGGAAVMATPGVFVDFSRQRALAADGRSKAFGAGADGFGFSEGVTLVLLERLSEARRNGHEVLAVVRGSALNQDGASNGLSAPSGPAQRRVIRQALESCGLEPGDVDAVEAHGTGTALGDPIEANALLDTYGRDRDADRPLWLGSVKSNIGHTQAAAGVTGLLKVVLALRNGELPATLHVEEPTPHVDWSSGGVALLAGNQPWRRGERTRRAAVSAFGISGTNAHVIVEEAPQEVRPAPGQGLSPAVSTLVVAGKTMQRVSATAGMLADWMEGPGADVALADVAHTLNHHRSRQPKFGTVVARDRTQAIAGLRALAAGQHAPGVVNPAEGSPGPGTVFVFPGQGSQRAGMGEELAAAFPVFARIHQQVWDLLDVPDLDVNETGYAQPALFALQVALFGLLESWGVRPDAVVGHSVGELAAGYVSGLWSLEDACTLVSARARLMQALPAGGVMAAVPVSEDEARAVLGEGVEIAAVNGPSSVVLSGDEAAVLQAAEGLGKWTRLPTSHAFHSARMEPMLEEFRAVAEGLTYRTPQVAMAAGDQVMTAEYWVRQVRDTVRFGEQVASFEDAVFVELGADRSLARLVDGIAMLHGDHEAQAGMRREQPLPLGLRRLLTDLHNAGAAVDFSVLCPQGRLVDAPLPAWSHRFLFYDREGVDNRSPGGSTVAVHPLLLAAVDVPGHGGAVFTGRLSTDEQPWLAEHVVGGRTLVPGSVLVDLALAAGEDVGLPVLEELVLQRPLVLAGAGALLRMSVGAPDESGRRTIDVHAAEDVADLADAQWSQHATGTLAQGVAAGPRDTEQWPPEDAVRIPLDDHYDGLAEQGYEYGPSFQALVAYVAEDATATMLAEVALPGSIRSQQGLYAIHPALLDACFQSVGAHPDSQSVGSGLLVPLGVRRVRAYAPVRTARYCYTRVTKVELAGVEADIDVLDAHGTVLLAVCGLRIGTGVSERDKHNRVLNERLLTIEWHQRELPEMDPSGAGKWLLISDCAASDVTATRLADAFREHSAACTTMRWPLHDDQLAAADQLRDQVGSDEFSGVVVLTGPNTGTPHQGSADRGAEYVRRLVGIARELSDLPGAVPRMYVVTRGAQRVLADDCVNLEQGGLRGLLRTIGAEHPHLRATQIDVDEQTGVEQLARQLLATSEEDETAWRDNEWYVARLCPTPLRPQERRTIVADHQQSGMRLQIRTPGAIDSVAFEPAPDVEQPLRAGEVRVDVRATGVNFRDVLLALGMYPQKADMGTEAAGVVTAVGPDVDAFAPGDRVLGLFQGAFAPIAVTDHRLLARVPDGWSDADAAAVPIAYTTAHYALHDLAGLRAGQSVLIHAAAGGVGMAAVALARRAGAEVLATAGPAKHGTLRALGLDDEHIASSRETGFARKFRERTGGRGVDVVLNSLTGELLDESADLLAEDGVFVEMGKTDLRDAGDFRGRYAPFDLGEAGDDRLGEILREVVGLLGAGELDRLPVSAWELGIPQTGKSLVTLPPEQAQVFRPDGTVLITGGTGTLGRLLARHLVTEHGVRHLLLVSRRGADAPGSDELRAEIEDLGASAEIAACDTADRDALSALLDGLPRPLTGVVHAAGVLADGLVTSIDEPAVEQVLRAKVDAAWNLHELTANTGLSFFVLFSSAASVLAGPGQGVYAAANESLNALAALRRTRGLPAKALGWGLWAIGRAIAFAEQTGDAIAPEEGAYAFETLLRHNRAYSGYAPVIGSPWLTAFAQHSPFAEKFQSLGQNRSGTSKFLAELVDLPREEWPDRLRRLLELVRSHAAAVSGYGSADQLPERKAFKDLGFDSLAAVELRNRLGTATGVRLPSTLVFDHPTPLAVAEHLRDRLLASARAPRDVRQTAHADAAEPAGDDGLQHLPLVAAQPGIWMAEKLSELPSAWSVAHYVELTGEVDSPLLARAVVAGLAQADTLRMRFTEDNGEVWQWVDDALTFELPEIIDLRTNIDPHGTAQALMQADLQQDLRVDSGKPLVFHQLIQVADNRWYWYQRYHHLLVDGFSFPAITRQIANIYCTWLRGEPTPASPFTPFADVVEEYQQYRESEAWQRDAAFWAEQRRQLPPPASLSPAPLPGRSASADILRLKLEFTDGEFRQLATQLSGVQRTDLALALAALWLGRLCNRMDYAAGFIFMRRLGSAALTATGPVLNVLPLGIHIGNPSFSELLTRVREVALGAYAHQHIPFEMLVEALQPERNLSHTPLFQVMFVLQNAPASQLELTGITANPIKVKSTTTKFDLTLIMQNTASGLVGVWEYNTDLFDASTIERMTGHFVTLLEGVIANPQQPISQLPILTTVEQQQLLVEWNNTQTDYPADKCIHQLFEEQVERTPDAVAVVFGNQQLSYREMREQVVALANLLRERGVKPGDSVAVALPRSVFLTLALHAIVEAGAAWLPLDTGYPDDRLKMMLEDARPSLLITTDDQLPRFSDVPNLTSLCYNAPLTPQGSAPLQLSQPHHTAYIIFTSGSTGRPKGVMVGQTAIVNRLLWMQNHYPLTGEDVVAQKTPCSFDVSVWEFFWPFIAGAKLVMAEPEAHRDPLAMQQFFAEYGVTTTHFVPSMLAAFVASLTPQTARQSCATLKQVFCSGEALPADLCREWQQLTGAPLHNLYGPTEAAVDVSWYPAFGEELAQVRGSSVPIGYPVWNTGLRILDAMMHPVPPGVAGDLYLTGIQLAQGYLGRPDLTASRFIADPFAPGERMYRTGDVARWLDNGAVEYLGRSDDQLKIRGQRIELGEIDRVMQALPDVEQAVASCAIAREDIPGNKHLVAYIVPQEEQTCTERSRSTLTVSFVRSFLKEKLPEYMVPSAIVILDALPLTPNGKLDRRALPAPDLHSQLETIIAAAFSSLLGCDVQDADADFFALGGHSLLAMKLAAQLSRQVARQVTPGQVMVASTVAKLATIIDAELDKYVAPRNPITSGEDNPIPLCQGDGEEMSTWLRRFGPPVEHRARLVCFPHAGAAADSYLDLARALAPEIDVHAVQYPGRQDRRDEEPLGTAGEIADEVAAVLRASGGDGPFALFGHSMGALIAYETARRLEREPGGGPLRLFVSGQTAPRVHERRTDLPGDDGLVDELRRLGTSEAALADEALLAMSLPVLRADYRVLRSYAWADGPPLRAGITALCGDADPLTATGDAERWLQHSVIPGRTRTFPGGHFYLGEQVTEVAGAVRRDLLRAGLAG

SEQ ID NO: 132 - DNA, 10341 bp, Artificial Sequence
  Ile-Ser-MalOH
atggttgccaaacatagtctggaaaacggtgtctttcacaagatgactgaaaacgagaaggaattgatccttcatttcaacaacactaagacagattaccctaagaacaagacgttgcatgaactttttgaagagcaggcaatgaaaaccccggatcacacagcactggtgttcggcgctcagagaatgacctacagggaactgaacgagaaggcgaatcaaacggcccgtctgttacgcgaaaaagggatcggacgtggcagcattgcggccattatcgcagatcgctcttttgaaatgatcatcggaatcatcggcatcctaaaggcaggcggtgcttatctgccgattgacccagaaaccccgaaagatcgtatcgcgttcatgctgagcgataccaaggcagctgtattgcttacgcagggaaaagcggccgatggcattgactgcgaagcggatatcgtgcaactggaccgtgaagccagcgatggtttttctaaagagccgctgagctctgttaatgatagtggcgacaccgcgtatattatctacacgagtggttccaccgggaccccgaaaggtgtgattaccccgcattattccgttatccgcgtggttcagaacactaactacatcgatatcacagaagacaacgtaatcctccaactatcaaactactcgttcgacggtagtgtgtttgatattttcggtgcgctcctaaacggggcctccctggtgatgatcgagaaagaagcactgttaaacattaatcgtctgggctcagctatcaatgaagagaaagtgagcgtgatgtttattaccacggcgctgttcaacatgattgccgatatccatgttgactgcctctcaaacctgcgtaaaattctgtttggcggcgaacgagcttcgatcccacatgtccgcaaggtactgaaccacgtcggtcgcgataaattaattcacgtatatggcccgactgaatcaacagtgtacgccacctattacttcataaacgaaattgatgacgaggcggaaactatccccataggtagcccgctggccaataccagcgtgctgattatggacgaagcaggcaaactggtcccaattggagtacctggcgaactgtgtatcgctggtgatgggttgtctaaaggttatcttaaccgtgaagagctcaccgcggaaaaatttatcccgcatccattcattcccggtgaacgtctgtacaagacgggcgaccttgccaaatggctcccagatggaaatatcgaatttataggccgcattgatcatcaggttaaaatccgtggctttcgaattgaactgggggagatcgaaagccgtttagaaatgcacgaggacatcaacgaaaccattgtgacggttcgcgaggatgaagagagccggccgtatatctgtgcatacattaccgctaatcgtgaaatttctcttgatgagctcaagggttttctgggggaaaaattacccgagtatatgatcccggcgtacttcgttaagctggataaactgccgttaacgaagaatggtaaagtcgaccggaaagccctgcctgaacccgatcgtactgcgggcgccgagaacgaatatgaggcaccgcgcaatgaaacagaagagaaactggcagctgtctggcaggacgtgttacatgttgaaaaagcaggcattcatgatcactttgctcaaatgggcggtcattcattgcacgcaatggaacttatcgctaagatcaaggaaaagatgaacgttgagatcccgctgcaccagttatttaagttggcgaccattaaagaactgtcggcgttcatcgaggccaatgccattcagacaggcgcatcactgtcaattccggcaatccaatcgcgcagcaaccgtgaccagcacttgcccttagtagctgcgcaacctggaatatggatggccgagaagttatctgaactaccatcagcgtggagcgtagcgcattacgtggagctcactggtgaggttgactcgcctcttttggccagggcggtagtggctggccttgcacaagctgacaccttaagaatgcgtttcacagaggataatggggaagtttggcaatgggtagacgatgcgttaacatttgagttaccggaaatcatagacctgcgcactaacatagaccctcacgggacagctcaggccttgatgcaagcggacctgcaacaggacctacgtgtggattcggggaagcctctggtcttccatcagctaattcaagtagcggacaatcgctggtactggtatcaaaggtaccaccacttgcttgtggacgggttcagttttccagcgataaccaggcaaatagccaacatttattgcacttggttgcgaggagagcctacgcccgcatcccccttcacgccattcgcagacgttgttgaggaataccaacagtatcgcgagagcgaagcgtggcaacgcgatgcggcattctgggcggagcaacgacggcaactaccgcctcccgcatccctatcacctgccccgctccccggccggtccgcgtcagccgacattctacggctaaagctggagttcacagatggtgaatttcgacagcttgctacacaactcagcggggtacaaaggacagacctagcgctcgctctggctgcattatggctaggacgactttgcaatcgaatggactacgcggcgggtttcatatttatgcgccggctcggcagcgcagcgttgaccgcaacgggtccagttttaaatgttcttcctttgggaatccacataggcaacccaagcttctctgagcttctcaccagggttcgcgaggtcgccttaggcgcgtatgcacaccaacatattccttttgagatgttagtagaggcactgcaaccagagcgaaaccttagccatactcctctcttccaagtgatgtttgtccttcagaatgcgcccgcgtcccaattagagttaaccgggatcaccgcaaacccaattaaggttaaatcaactaccacgaagttcgacctaactttaatcatgcaaaacacagctagcggattagtaggtgtttgggagtacaacacggatttattcgacgcgtcaacgattgagcgaatgacagggcactttgtaaccctcctcgagggcgttatcgccaatccacaacagccgatctctcaacttcctattttaactacagtggagcaacagcaacttttagtcgagtggaataacacgcaaaccgactaccccgctgataagtgtatacatcaattattcgaggaacaggtcgagcgcacaccagacgccgttgctgtcgtctttgggaatcagcaactcagctatcgagagatgcgcgaacaagtggttgcactcgccaatttattacgtgagcggggagtcaagccaggagactccgttgccgtggccttaccacgctctgttttcttaacccttgcactacacgcgattgtcgaggcaggtgccgcctggctacctcttgacacaggatatcctgacgatagattaaaaatgatgctcgaggatgcacggccttcccttctgatcacaacagacgatcaattaccccgcttcagtgacgtacctaatctgacctcactctgttacaacgctcccttgacgcctcaagggagcgcccctttacagctgtctcaacctcaccatactgcatatatcatctttacaagtggttctacgggacgccccaagggagtaatggttggtcagactgcgattgtaaatcgtctgttgtggatgcaaaaccactaccctttgacgggggaggacgttgtagcccaaaagactccttgctcgttcgatgtctcagtctgggagttcttttggccatttatagcaggggccaaattagttatggcggagccggaagcccaccgagacccacttgcgatgcagcaattctttgctgagtatggtgtcaccactacacatttcgtcccatcgatgttagcggccttcgtggcttctcttactccacaaacggctaggcaatcttgtgccacactaaagcaagtcttctgctccggcgaggcattacctgcagacttgtgccgggaatggcagcaactcacaggagctccattgcacaatctatacggaccgaccgaggccgcagtagacgtatcttggtatcctgcgtttggcgaggagttagcgcaagtaagaggttcgtcagtaccaataggataccccgtatggaacacggggcttcggatactggacgcgatgatgcatccggtcccaccaggagtcgcgggcgatttatacctgactgggatacagctggcccaaggttacctagggagacctgaccttacggcgtcgaggttcatagcggatccgtttgctccgggtgagcgcatgtaccgtacgggcgacgtcgcgcgatggctagataatggcgccgtagagtatcttggtagatcagacgatcagttaaagatacggggacaacgaatagagcttggggaaatagaccgggtaatgcaggctttgccagatgtcgagcaagcggtggcttcgtgtgctattgcgcgggaggacatacctgggaacaaacaccttgtagcgtacatagttcctcaagaggagcaaacatgcactgagcgatcgaggtccacacttacagtttcgttcgtccggagtttccttaaggagaaactccccgaatatatggtaccgagcgcaatagtgattctagacgctctccccctgactcctaatggaaagctagaccggcgggcgttacccgcccctgacctgcactcacaacttgagacaattattgctgcggctttctcgagcctgctcgggtgcgacgtacaagacgcggatgctgactttttcgcgctaggtggccattcgctgcttgccatgaagctagccgctcagctttcccgacaagtagcgcggcaggtgacaccaggccaagttatggtagcttcgactgtcgcaaagctcgcaacgatcatagacgcggagttagataaatacgtcgctccaaggaacccgatacctggaattggggcgctagttcccgctcccgtggtaatcgcagcaggccgtacggaggaaccaattgccatcgtttcgatggcatgtcgtttaccgggaggagtcaatacgccccaacggctctgggaattactacgggagggtggtgaaaccttgtccgggttcccaacggaccgtggctgggacctagcacggcttcaccaccctgatccggacaaccccggaacgagctacgttgataagggtggatttctcgacgacgcggcgggtttcgacgcagagtttttcggggtttcaccaagggaagctgccgctatggaccctcagcaacgattacttttagagacctcgtgggagctagttgaaaatgcgggcatagatccacatagcctgcgagggacagcgacaggggtgttcctaggagttgcgaagtttggttatggtgaggacacagcagcagcggaagatgttgaaggttattcagttaccggtgttgctcccgctgtggcatctggccgcatatcctacactatgggtttagaaggtccttccatctcggtcgataccgcatgctcaagctcgctagtcgcgcttcatctagccgtagagtccctccgaaagggtgagtcatctatggcggtggtgggtggtgcagccgttatggcgactcctggggtatttgttgatttttcacgccaacgggcgcttgccgcagacggccgttccaaagcgttcggggcaggtgcagatggttttggtttcagcgagggagtcacgctggttctactagagcgtttaagtgaggcgcgtcgtaacggtcatgaagttctagctgtagtgcgcgggtccgcgttaaaccaggacggagcgagcaacggactttcagcaccctccggccctgcgcaacgtagagtaataaggcaagcgctcgaatcgtgtgggcttgaaccgggggatgttgacgcggttgaggcgcatggtactggtacagcactaggtgacccaatagaggccaatgcgctgttggacacttacgggcgagaccgtgatgcggatcgtccactttggttggggtccgttaagagcaatattgggcacactcaagctgcggccggggttacaggactgctgaaggttgtgttagcactgcgcaatggtgagctacctgcaacgttacatgtcgaggaaccaactccacacgtcgattggtcctcaggtggtgtcgcattactggcgggtaatcaaccatggcgaaggggagaaaggaccagaagggcggcagtgagcgcctttggtatctccggtacaaatgctcacgtgatagtggaagaggcgcctcaggaagttcgacccgcccctggccaagggctgtcgccagccgtgtccacgttagttgttgcaggtaaaaccatgcagcgtgtaagtgcgacagctggaatgcttgcagactggatggagggtcctggggccgatgttgcattggcggatgtggcccataccctgaaccatcaccgatcaagacagcccaagttcgggacggttgtagcgcgtgacaggactcaggcgatagctgggctccgtgcattggcggctggtcaacatgctcctggggtcgtcaacccagctgaaggttccccaggaccaggcaccgtgttcgtttttcccggtcaaggttcgcagagggcagggatgggggaggaactcgcggcagcctttcctgtcttcgctcgaatacatcagcaagtttgggacctcctagatgttcccgacctcgacgttaatgaaaccgggtacgcccaaccagcgctgttcgcgcttcaggtcgcgctctttggccttctggagtcgtggggtgttaggccagatgcagtggtagggcactcagttggtgagctggccgcggggtacgtgtccggtctttggtcactagaggacgcctgcacactagtctcagcaagagcgcgcctaatgcaggcactgcctgctggaggggtgatggcggcagtccccgtctccgaggatgaggcgcgggccgtcctgggcgagggagttgaaattgcggctgtgaatggaccctcgtccgttgtgctctcaggggacgaggcggcagtcttacaggccgccgaaggtctaggtaagtggacgcgactgccgaccagccatgcttttcactcagcgagaatggaacccatgctagaagagtttcgggccgtagcagagggtctgacctatcgtacccctcaagtagctatggctgctggggatcaggtgatgacagcagaatattgggtgcggcaggttcgggacacagttcgcttcggggagcaagtagcgtcattcgaggatgcggtgtttgttgagttaggcgctgacagaagtctagcgcgtttggtggacggcatcgccatgctgcacggtgaccacgaagcgcaggccgcggaccataggcaaatcaccgaagcggttgcggatgcttacgtcttaggccaccttccggattttgcggcgctgcggcggcctcacgcacgaaagttggacttaccaacttatcccttcgagcgtagacagtactggttcagagatgcgcgtgagaggccggaacaacccagagataccggcggacctcgcacagaagcagtccgtctgttagaggatggtaggattgaagaattagctgcacttttgggaggggccagtgatgaccaacacacattacaggtgctgactaagttggcggcgcaacataaccaacaacgaacaacccggtcaatcgctgacgacaggtacgaaataaggtgggaccgatcgacttccccactatccggagcagatgttgaccaagcggggagctggatcgtggtgtcagatgacgcagatgccgttcccccgctagtggacttgctggctgcacgtaacgagccccatcaggttgttggtctacccgcttcggacgcagacgaggagaggctcgcagagactctgcgtgcggctgcgactgaagatgctacccttcggatagtccacgttgcggcgctcgaagcaggcgctacccccagcatgcgttcactgctccgcatgcagcaccgaatactaggtggcacgcggcgggtgttcagggcagcggtcgcagcggagttaagaggtcccatttggatagtgacgcggggagcacaaagagtggctgacaccgatacagttgccccgcatcagtcatgcctctggggatttgggagggcagcatcgctggagctgccgcacgtttggggtggcctagcagatttatcagagggcggtgacaatgcggccgatgagtggagtgcgctagtggaccgcattgccgcaccccacggttcagcagttagggaggaccaactggcgctgagagacagggccgtatatacgccaagactggccagacgttctgcgcccccgagcgggactcccctacatctacgaggggatggcacagtgttaataacaggtgggactggtacactaggtaggctattagcgcgtcacctagtaacagagcatggggtgcggcatctcttactagtttcaaggagaggcgccgatgcccctggctcggatgaactgcgcgcagaaatagaggacttaggtgccagcgcggagatcgcagcgtgtgatacagcggatcgcgatgccctatctgccctactagatggtctcccccggccccttacgggtgtcgttcacgccgctggcgtgttagccgatggacttgtcactagcattgacgagcctgcggtggaacaggttctccgagcaaaggtggacgcggcatggaacctacacgaactcacagctaataccgggctatcctttttcgttcttttctcatcagcagcatcggtcctggcaggtccagggcaaggagtttatgcggctgcaaatgaatcgctcaacgcactagctgcgttaaggcgaactaggggtctgccggccaaggctctgggatggggcctgtgggccatcgggcgggcaatcgcttttgcggagcagaccggggacgccatcgctccagaggaaggagcatacgcttttgaaactctgttaaggcataaccgtgcctactcgggatatgcgcccgtcattggatctccctggttgaccgcgttcgcacagcattccccctttgcagaaaaattccaatcactcggacagaatcggtcagggacatcgaaattcttagcggagctagttgacctgcctcgtgaggaatggccggataggctcaggagactactagagttagttaggtcccatgccgccgcggtctccggttacggtagtgcagatcaactgccggaaagaaaagcgttcaaggatttggggtttgattcgctggccgccgttgaactgcgtaaccggctgggaacggctacaggggtacgactgccgtcaaccctagtatttgatcacccaactccgctggccgtcgctgagcacttaagagataggctaacatccggggaagataaccctatccccctatgtcaaggcgatggggaggagatgagcacatggctacgtcgttttggacccccagtcgaacatcgggccaggctagtgtgtttcccccacgcaggcgcagcggcggattcatacttagacctagcaagagcgttagcaccagagatcgatgttcatgctgttcaataccccggcaggcaagacagaagggacgaggagccattaggaaccgcaggtgaaattgcagatgaagtggcagcggtgctacgtgcgtcgggaggggatgggccttttgcacttttcggccacagtatgggcgccctcatcgcgtacgagacagcaaggcgattagagagggaaccgggagggggacccttacgtttattcgtgagcggacaaacagcgccacgtgtccatgaacgaagaactgatctgcccggtgacgatggactcgtggacgagcttaggcgacttggcacctccgaggcagcgctcgcagacgaagccctgctggctatgtctctcccggtgctcagggcggattatagggtgttaagatcctacgcttgggcggatggtcccccactacgcgccggtataactgccctctgcggtgatgcagacccactaactgcaacaggggatgcggaacgctggttacaacattccgtgattccgggtcggacacggacatttcccggtgggcatttttatttaggggaacaagtgaccgaggtggcaggggctgtccgtagagatttactgagagcagggttagcgggttga

SEQ ID NO: 133 - protein, 3446 aa, Artificial Sequence
  Ile-Ser-MalOH
MVAKHSLENGVFHKMTENEKELILHFNNTKTDYPKNKTLHELFEEQAMKTPDHTALVFGAQRMTYRELNEKANQTARLLREKGIGRGSIAAIIADRSFEMIIGIIGILKAGGAYLPIDPETPKDRIAFMLSDTKAAVLLTQGKAADGIDCEADIVQLDREASDGFSKEPLSSVNDSGDTAYIIYTSGSTGTPKGVITPHYSVIRVVQNTNYIDITEDNVILQLSNYSFDGSVFDIFGALLNGASLVMIEKEALLNINRLGSAINEEKVSVMFITTALFNMIADIHVDCLSNLRKILFGGERASIPHVRKVLNHVGRDKLIHVYGPTESTVYATYYFINEIDDEAETIPIGSPLANTSVLIMDEAGKLVPIGVPGELCIAGDGLSKGYLNREELTAEKFIPHPFIPGERLYKTGDLAKWLPDGNIEFIGRIDHQVKIRGFRIELGEIESRLEMHEDINETIVTVREDEESRPYICAYITANREISLDELKGFLGEKLPEYMIPAYFVKLDKLPLTKNGKVDRKALPEPDRTAGAENEYEAPRNETEEKLAAVWQDVLHVEKAGIHDHFAQMGGHSLHAMELIAKIKEKMNVEIPLHQLFKLATIKELSAFIEANAIQTGASLSIPAIQSRSNRDQHLPLVAAQPGIWMAEKLSELPSAWSVAHYVELTGEVDSPLLARAVVAGLAQADTLRMRFTEDNGEVWQWVDDALTFELPEIIDLRTNIDPHGTAQALMQADLQQDLRVDSGKPLVFHQLIQVADNRWYWYQRYHHLLVDGFSFPAITRQIANIYCTWLRGEPTPASPFTPFADVVEEYQQYRESEAWQRDAAFWAEQRRQLPPPASLSPAPLPGRSASADILRLKLEFTDGEFRQLATQLSGVQRTDLALALAALWLGRLCNRMDYAAGFIFMRRLGSAALTATGPVLNVLPLGIHIGNPSFSELLTRVREVALGAYAHQHIPFEMLVEALQPERNLSHTPLFQVMFVLQNAPASQLELTGITANPIKVKSTTTKFDLTLIMQNTASGLVGVWEYNTDLFDASTIERMTGHFVTLLEGVIANPQQPISQLPILTTVEQQQLLVEWNNTQTDYPADKCIHQLFEEQVERTPDAVAVVFGNQQLSYREMREQVVALANLLRERGVKPGDSVAVALPRSVFLTLALHAIVEAGAAWLPLDTGYPDDRLKMMLEDARPSLLITTDDQLPRFSDVPNLTSLCYNAPLTPQGSAPLQLSQPHHTAYIIFTSGSTGRPKGVMVGQTAIVNRLLWMQNHYPLTGEDVVAQKTPCSFDVSVWEFFWPFIAGAKLVMAEPEAHRDPLAMQQFFAEYGVTTTHFVPSMLAAFVASLTPQTARQSCATLKQVFCSGEALPADLCREWQQLTGAPLHNLYGPTEAAVDVSWYPAFGEELAQVRGSSVPIGYPVWNTGLRILDAMMHPVPPGVAGDLYLTGIQLAQGYLGRPDLTASRFIADPFAPGERMYRTGDVARWLDNGAVEYLGRSDDQLKIRGQRIELGEIDRVMQALPDVEQAVASCAIAREDIPGNKHLVAYIVPQEEQTCTERSRSTLTVSFVRSFLKEKLPEYMVPSAIVILDALPLTPNGKLDRRALPAPDLHSQLETIIAAAFSSLLGCDVQDADADFFALGGHSLLAMKLAAQLSRQVARQVTPGQVMVASTVAKLATIIDAELDKYVAPRNPIPGIGALVPAPVVIAAGRTEEPIAIVSMACRLPGGVNTPQRLWELLREGGETLSGFPTDRGWDLARLHHPDPDNPGTSYVDKGGFLDDAAGFDAEFFGVSPREAAAMDPQQRLLLETSWELVENAGIDPHSLRGTATGVFLGVAKFGYGEDTAAAEDVEGYSVTGVAPAVASGRISYTMGLEGPSISVDTACSSSLVALHLAVESLRKGESSMAVVGGAAVMATPGVFVDFSRQRALAADGRSKAFGAGADGFGFSEGVTLVLLERLSEARRNGHEVLAVVRGSALNQDGASNGLSAPSGPAQRRVIRQALESCGLEPGDVDAVEAHGTGTALGDPIEANALLDTYGRDRDADRPLWLGSVKSNIGHTQAAAGVTGLLKVVLALRNGELPATLHVEEPTPHVDWSSGGVALLAGNQPWRRGERTRRAAVSAFGISGTNAHVIVEEAPQEVRPAPGQGLSPAVSTLVVAGKTMQRVSATAGMLADWMEGPGADVALADVAHTLNHHRSRQPKFGTVVARDRTQAIAGLRALAAGQHAPGVVNPAEGSPGPGTVFVFPGQGSQRAGMGEELAAAFPVFARIHQQVWDLLDVPDLDVNETGYAQPALFALQVALFGLLESWGVRPDAVVGHSVGELAAGYVSGLWSLEDACTLVSARARLMQALPAGGVMAAVPVSEDEARAVLGEGVEIAAVNGPSSVVLSGDEAAVLQAAEGLGKWTRLPTSHAFHSARMEPMLEEFRAVAEGLTYRTPQVAMAAGDQVMTAEYWVRQVRDTVRFGEQVASFEDAVFVELGADRSLARLVDGIAMLHGDHEAQAADHRQITEAVADAYVLGHLPDFAALRRPHARKLDLPTYPFERRQYWFRDARERPEQPRDTGGPRTEAVRLLEDGRIEELAALLGGASDDQHTLQVLTKLAAQHNQQRTTRSIADDRYEIRWDRSTSPLSGADVDQAGSWIVVSDDADAVPPLVDLLAARNEPHQVVGLPASDADEERLAETLRAAATEDATLRIVHVAALEAGATPSMRSLLRMQHRILGGTRRVFRAAVAAELRGPIWIVTRGAQRVADTDTVAPHQSCLWGFGRAASLELPHVWGGLADLSEGGDNAADEWSALVDRIAAPHGSAVREDQLALRDRAVYTPRLARRSAPPSGTPLHLRGDGTVLITGGTGTLGRLLARHLVTEHGVRHLLLVSRRGADAPGSDELRAEIEDLGASAEIAACDTADRDALSALLDGLPRPLTGVVHAAGVLADGLVTSIDEPAVEQVLRAKVDAAWNLHELTANTGLSFFVLFSSAASVLAGPGQGVYAAANESLNALAALRRTRGLPAKALGWGLWAIGRAIAFAEQTGDAIAPEEGAYAFETLLRHNRAYSGYAPVIGSPWLTAFAQHSPFAEKFQSLGQNRSGTSKFLAELVDLPREEWPDRLRRLLELVRSHAAAVSGYGSADQLPERKAFKDLGFDSLAAVELRNRLGTATGVRLPSTLVFDHPTPLAVAEHLRDRLTSGEDNPIPLCQGDGEEMSTWLRRFGPPVEHRARLVCFPHAGAAADSYLDLARALAPEIDVHAVQYPGRQDRRDEEPLGTAGEIADEVAAVLRASGGDGPFALFGHSMGALIAYETARRLEREPGGGPLRLFVSGQTAPRVHERRTDLPGDDGLVDELRRLGTSEAALADEALLAMSLPVLRADYRVLRSYAWADGPPLRAGITALCGDADPLTATGDAERWLQHSVIPGRTRTFPGGHFYLGEQVTEVAGAVRRDLLRAGLAG

SEQ ID NO: 134 - DNA, 11994 bp, Artificial Sequence
  Ile-Ser-MalH
atggttgccaaacatagtctggaaaacggtgtctttcacaagatgactgaaaacgagaaggaattgatccttcatttcaacaacactaagacagattaccctaagaacaagacgttgcatgaactttttgaagagcaggcaatgaaaaccccggatcacacagcactggtgttcggcgctcagagaatgacctacagggaactgaacgagaaggcgaatcaaacggcccgtctgttacgcgaaaaagggatcggacgtggcagcattgcggccattatcgcagatcgctcttttgaaatgatcatcggaatcatcggcatcctaaaggcaggcggtgcttatctgccgattgacccagaaaccccgaaagatcgtatcgcgttcatgctgagcgataccaaggcagctgtattgcttacgcagggaaaagcggccgatggcattgactgcgaagcggatatcgtgcaactggaccgtgaagccagcgatggtttttctaaagagccgctgagctctgttaatgatagtggcgacaccgcgtatattatctacacgagtggttccaccgggaccccgaaaggtgtgattaccccgcattattccgttatccgcgtggttcagaacactaactacatcgatatcacagaagacaacgtaatcctccaactatcaaactactcgttcgacggtagtgtgtttgatattttcggtgcgctcctaaacggggcctccctggtgatgatcgagaaagaagcactgttaaacattaatcgtctgggctcagctatcaatgaagagaaagtgagcgtgatgtttattaccacggcgctgttcaacatgattgccgatatccatgttgactgcctctcaaacctgcgtaaaattctgtttggcggcgaacgagcttcgatcccacatgtccgcaaggtactgaaccacgtcggtcgcgataaattaattcacgtatatggcccgactgaatcaacagtgtacgccacctattacttcataaacgaaattgatgacgaggcggaaactatccccataggtagcccgctggccaataccagcgtgctgattatggacgaagcaggcaaactggtcccaattggagtacctggcgaactgtgtatcgctggtgatgggttgtctaaaggttatcttaaccgtgaagagctcaccgcggaaaaatttatcccgcatccattcattcccggtgaacgtctgtacaagacgggcgaccttgccaaatggctcccagatggaaatatcgaatttataggccgcattgatcatcaggttaaaatccgtggctttcgaattgaactgggggagatcgaaagccgtttagaaatgcacgaggacatcaacgaaaccattgtgacggttcgcgaggatgaagagagccggccgtatatctgtgcatacattaccgctaatcgtgaaatttctcttgatgagctcaagggttttctgggggaaaaattacccgagtatatgatcccggcgtacttcgttaagctggataaactgccgttaacgaagaatggtaaagtcgaccggaaagccctgcctgaacccgatcgtactgcgggcgccgagaacgaatatgaggcaccgcgcaatgaaacagaagagaaactggcagctgtctggcaggacgtgttacatgttgaaaaagcaggcattcatgatcactttgctcaaatgggcggtcattcattgcacgcaatggaacttatcgctaagatcaaggaaaagatgaacgttgagatcccgctgcaccagttatttaagttggcgaccattaaagaactgtcggcgttcatcgaggccaatgccattcagacaggcgcatcactgtcaattccggcaatccaatcgcgcagcaaccgtgaccagcacttgcccttagtagctgcgcaacctggaatatggatggccgagaagttatctgaactaccatcagcgtggagcgtagcgcattacgtggagctcactggtgaggttgactcgcctcttttggccagggcggtagtggctggccttgcacaagctgacaccttaagaatgcgtttcacagaggataatggggaagtttggcaatgggtagacgatgcgttaacatttgagttaccggaaatcatagacctgcgcactaacatagaccctcacgggacagctcaggccttgatgcaagcggacctgcaacaggacctacgtgtggattcggggaagcctctggtcttccatcagctaattcaagtagcggacaatcgctggtactggtatcaaaggtaccaccacttgcttgtggacgggttcagttttccagcgataaccaggcaaatagccaacatttattgcacttggttgcgaggagagcctacgcccgcatcccccttcacgccattcgcagacgttgttgaggaataccaacagtatcgcgagagcgaagcgtggcaacgcgatgcggcattctgggcggagcaacgacggcaactaccgcctcccgcatccctatcacctgccccgctccccggccggtccgcgtcagccgacattctacggctaaagctggagttcacagatggtgaatttcgacagcttgctacacaactcagcggggtacaaaggacagacctagcgctcgctctggctgcattatggctaggacgactttgcaatcgaatggactacgcggcgggtttcatatttatgcgccggctcggcagcgcagcgttgaccgcaacgggtccagttttaaatgttcttcctttgggaatccacataggcaacccaagcttctctgagcttctcaccagggttcgcgaggtcgccttaggcgcgtatgcacaccaacatattccttttgagatgttagtagaggcactgcaaccagagcgaaaccttagccatactcctctcttccaagtgatgtttgtccttcagaatgcgcccgcgtcccaattagagttaaccgggatcaccgcaaacccaattaaggttaaatcaactaccacgaagttcgacctaactttaatcatgcaaaacacagctagcggattagtaggtgtttgggagtacaacacggatttattcgacgcgtcaacgattgagcgaatgacagggcactttgtaaccctcctcgagggcgttatcgccaatccacaacagccgatctctcaacttcctattttaactacagtggagcaacagcaacttttagtcgagtggaataacacgcaaaccgactaccccgctgataagtgtatacatcaattattcgaggaacaggtcgagcgcacaccagacgccgttgctgtcgtctttgggaatcagcaactcagctatcgagagatgcgcgaacaagtggttgcactcgccaatttattacgtgagcggggagtcaagccaggagactccgttgccgtggccttaccacgctctgttttcttaacccttgcactacacgcgattgtcgaggcaggtgccgcctggctacctcttgacacaggatatcctgacgatagattaaaaatgatgctcgaggatgcacggccttcccttctgatcacaacagacgatcaattaccccgcttcagtgacgtacctaatctgacctcactctgttacaacgctcccttgacgcctcaagggagcgcccctttacagctgtctcaacctcaccatactgcatatatcatctttacaagtggttctacgggacgccccaagggagtaatggttggtcagactgcgattgtaaatcgtctgttgtggatgcaaaaccactaccctttgacgggggaggacgttgtagcccaaaagactccttgctcgttcgatgtctcagtctgggagttcttttggccatttatagcaggggccaaattagttatggcggagccggaagcccaccgagacccacttgcgatgcagcaattctttgctgagtatggtgtcaccactacacatttcgtcccatcgatgttagcggccttcgtggcttctcttactccacaaacggctaggcaatcttgtgccacactaaagcaagtcttctgctccggcgaggcattacctgcagacttgtgccgggaatggcagcaactcacaggagctccattgcacaatctatacggaccgaccgaggccgcagtagacgtatcttggtatcctgcgtttggcgaggagttagcgcaagtaagaggttcgtcagtaccaataggataccccgtatggaacacggggcttcggatactggacgcgatgatgcatccggtcccaccaggagtcgcgggcgatttatacctgactgggatacagctggcccaaggttacctagggagacctgaccttacggcgtcgaggttcatagcggatccgtttgctccgggtgagcgcatgtaccgtacgggcgacgtcgcgcgatggctagataatggcgccgtagagtatcttggtagatcagacgatcagttaaagatacggggacaacgaatagagcttggggaaatagaccgggtaatgcaggctttgccagatgtcgagcaagcggtggcttcgtgtgctattgcgcgggaggacatacctgggaacaaacaccttgtagcgtacatagttcctcaagaggagcaaacatgcactgagcgatcgaggtccacacttacagtttcgttcgtccggagtttccttaaggagaaactccccgaatatatggtaccgagcgcaatagtgattctagacgctctccccctgactcctaatggaaagctagaccggcgggcgttacccgcccctgacctgcactcacaacttgagacaattattgctgcggctttctcgagcctgctcgggtgcgacgtacaagacgcggatgctgactttttcgcgctaggtggccattcgctgcttgccatgaagctagccgctcagctttcccgacaagtagcgcggcaggtgacaccaggccaagttatggtagcttcgactgtcgcaaagctcgcaacgatcatagacgcggagttagataaatacgtcgctccaaggaacccgatacctggaattggggcgctagttcccgctcccgtggtaatcgcagcaggccgtacggaggaaccaattgccatagtatccatggcttgccggttacccggtggtgtgaataccccacagagactatgggaattattacgtgaagggggagaaaccctcagtggcttccctaccgaccgagggtgggacctcgcgaggttgcatcacccagacccagacaaccccggtacgtcatacgttgataaagggggattcctggacgatgcggcagggtttgacgcagaatttttcggtgtgagccccagagaagcagcggctatggacccgcagcagagattactcctcgaaaccagctgggagttagtcgagaatgcagggattgatccacatagcctaagggggaccgccactggtgtcttcctcggcgttgccaagtttgggtatggcgaggatacggcagctgccgaagacgtcgaggggtactctgtcactggtgtagccccggcagtggcgtcgggcagaattagttacacgatggggttggaagggccgtctatttcggttgataccgcctgttcctccagtctggttgcactccaccttgcagtcgagtcgctccggaaaggagaaagcagtatggccgtggtcgggggagcggcggtgatggccacaccgggtgtgtttgtggatttttcccgacagagagccttggccgcggatgggcgttcaaaggcgttcggagcaggtgcagacgggtttggatttagcgaaggtgtgacactggttctcctagaaagattaagtgaagcccggcgtaacggccatgaggtgctggcagttgttagaggttccgcattaaaccaggacggggcttcgaacgggctgagcgccccctcgggcccggcacagagaagagtgatacgccaagcactcgaatcgtgtggcctagaaccaggtgacgttgacgcggtggaagcgcacgggacaggaactgcgttaggggacccgatagaagcaaacgccttgctggacacttatggtagagatcgtgatgcggatcgacccctctggttaggaagtgttaagtcaaatataggacacactcaggcagcggcgggagtaactgggctgctcaaagtagtcctagccttacgcaatggggaactacccgccaccctacatgtcgaggaaccgacaccgcatgtggattggtcgagcgggggagttgctctcttggcgggtaatcagccgtggcgaagaggtgaacgaacccgtagagccgccgtgtccgcattcgggatcagtggtacgaacgcgcacgtgattgtggaagaagctccacaagaggtgagaccagcgcccggtcaaggactctcgcccgcggtgtcaaccttggtagtggcgggtaaaactatgcagcgtgtttcggcaaccgccggtatgctcgcagattggatggaaggcccaggtgcagatgtggcgctggcggacgtggcgcacacgttaaatcatcaccgttcacggcaaccaaagttcggtacggtggtggccagggaccggacacaggcaatcgccggactaagagcgctggcggcgggtcagcacgccccaggggttgttaaccctgctgaaggaagtccaggtccagggacggtgttcgtgtttcctggccaggggtcccagcgtgcaggcatgggggaggagttggctgcggctttccccgtgtttgccagaatccaccagcaagtgtgggatttactcgatgttcctgatctcgacgttaacgaaacggggtacgcacaaccagcactcttcgcactccaagtggcgctgtttgggctcctcgaatcatggggagtacggccggatgccgtggtcgggcatagtgtaggggaattagcggcagggtacgtttccgggctttggagtcttgaggatgcttgcacgctcgtgtcggcgagagcccgtctaatgcaagccttaccggcaggtggtgttatggcggcagttccagtgtccgaagacgaagcacgggctgtgttgggggaaggagtcgaaatagctgcggtcaacggtccgtcgagcgtggttctaagcggtgatgaagcagcagtgctccaggccgcggaagggttaggcaagtggacgcgattaccgacctcgcatgcattccattctgctcgtatggaaccaatgctggaagagtttagagcagtggcggaaggtctaacatacaggactccccaggtggcaatggccgccggagaccaggttatgaccgctgaatactgggtgcgtcaggttagggatacagttcgttttggcgagcaagttgcctcgttcgaggatgctgtattcgtggaattgggagcagatcgctctcttgcacggctagtcgatggtatcgcgatgttgcacggggatcatgaggcacaggctggtatgcggagagaacaacccttgcccttaggtttacgaagattgctaaccgacctgcataacgctggtgctgccgtcgattttagtgttttgtgcccacaaggtcgtctggttgacgcaccgttaccagcctggtcacaccggtttctcttctatgaccgggaaggagtggacaatagatcaccagggggaagcacagtggcggtccacccgcttttactagccgcggtggatgtgccgggccacggtggagcggttttcacgggtagactctcgactgacgagcaaccgtggttagcggagcacgttgtcgggggaagaaccctagttcctggttctgttttagtcgatctagccttagcggcaggcgaagacgtagggctaccggtgttagaagaattagtattgcagaggccgctggtgcttgccggcgcgggagcactcctacggatgtcggtcggggcaccagacgagagcggtagaagaactatcgatgttcacgcagctgaagacgtcgccgatttagcagatgcccaatggtcccagcacgccaccgggactttagcccaaggggtagcggcggggcccagggacacagagcaatggcccccagaggatgccgtccggattccattagacgaccattatgatggtctcgcggaacagggttatgagtacggtccgtcgtttcaggcgctagtggcctacgtggcggaggatgcgactgcgacaatgttagcggaagtcgcgcttccgggcagcattagatcgcaacaaggtctatacgccatccatcccgcactgctggacgcttgttttcaatctgtcggagcccacccagacagtcaatccgtcgggtcaggtctactcgtacccctcggtgttcggagagttcgtgcgtacgcacccgtaaggaccgcccgttattgttacacccgcgtcacgaaagttgaactagctggggttgaggccgacatcgacgttctggatgctcacggcacagtgcttctagccgtgtgcggtcttcgtatcgggaccggagtgagcgagagggacaaacacaacagagttctcaatgagcgcctactcaccatcgaatggcatcagcgtgaactaccagaaatggacccctcgggtgccgggaagtggctcctaatctcggactgtgcagcatccgatgtcaccgctacacgactggctgatgccttccgggagcacagcgctgcgtgcactaccatgcggtggccacttcacgatgatcaactagcagccgccgaccaactccgggaccaggtgggttcagatgagttttctggcgtggtagtactaacagggccaaacacagggacccctcatcagggttccgcagaccgtggcgccgagtacgttaggcggttagttggaatcgctcgtgaacttagcgatcttcccggagcggttccccgtatgtatgtcgtcacaaggggagcgcagagagtccttgccgatgattgtgttaatttagaacagggagggctcagaggtctgctgaggaccatcggtgctgagcacccacatctccgcgccacccaaattgatgttgatgagcagacaggagtagagcagctggcgcgacaactcctagctacatcggaggaagacgagacagcctggagggacaacgaatggtacgttgcgaggttatgccccacacccctgaggccacaggaacgtaggacaatagtggcggaccatcaacagtctggtatgcggttacaaatacgtacgcccggtgcaatcgatagtgtggcctttgaacccgcacccgatgtagagcaacccttacgggcgggtgaagttcgggttgacgttagagcaaccggtgttaatttccgtgacgttctactcgctctcgggatgtatccccagaaagctgacatggggacagaagcagctggtgttgtaacagcagtgggacctgatgtcgatgcgtttgcgcctggtgatagagttctagggctattccaaggggcatttgctccaattgcggtgactgaccatcgtttactggcacgggtgccagacgggtggtcagatgccgatgcggcggcggtgccaatagcttacacgacagcacattatgcgctgcacgacctggcggggttgcgggcggggcaatctgtcctgatacacgcggcagcgggtggtgttggtatggccgctgttgcactggcacggagggccggcgcagaagttctggctaccgcaggacctgcaaaacacggtacgctacgggcattagggctagatgatgaacacatcgcttcgagtcgggagaccgggttcgcgcgtaagttccgagagcggactgggggacgaggagtggacgtcgttctaaacagcttgaccggcgaactattagacgagtccgcggatctcctcgcggaggacggagtcttcgtggaaatgggaaagactgatctgcgcgatgcaggggactttcgtgggcgctacgccccgtttgatctaggggaagcaggcgatgacaggctcggggaaattctacgtgaggtggtgggactgctcggtgcaggggaactcgaccgactccctgttagcgcgtgggaattggggataccccagacggggaagtcgttagtgacgctgccacccgaacaagcgcaagttttcagaccagacggcactgtattgatcaccgggggaacgggaacgttaggtcggctgctggcccgtcatctggttacagagcacggggtgcgtcacctgctgctagtgtcgaggagaggagcagatgcccctggatcggacgagctgagggccgaaatcgaggatctcggagcatcagcggaaattgcagcatgtgatacagccgatcgagacgctctcagcgcgttgctagatggactgccgaggccactgaccggagtagttcacgccgcgggagtcctcgctgacggtctggttacatccatcgacgagcccgcagtcgaacaagttctccgtgcaaaagttgatgcggcctggaacctgcacgagctaactgcgaacaccggtctcagctttttcgtgctgttctcgtcagccgcaagtgtgttagcggggccggggcagggagtatatgcggcagcgaacgaatctttaaacgctctggccgctctgcgtaggactaggggtttacccgcaaaagcattgggatggggattatgggcgatagggcgtgcaatagcatttgccgagcagaccggtgacgcaatcgccccggaggaaggcgcgtacgccttcgagacactactcagacataacagggcgtactcgggttacgctcccgtgatagggtcaccatggctgactgcgttcgcccaacattcgccctttgcggagaagttccagtccctggggcaaaatagatccgggacgtctaagtttctggcagaattagtcgatctgccaagagaagaatggccagatcggttacgtcgtctattagaactggtgaggtctcatgctgccgcagtttcggggtatggatcggcagaccaattaccagaaagaaaagcattcaaagacctcggattcgattcactggcagcagtcgaactaagaaatcgtctagggaccgcgacaggcgtccggctgcccagtactctggtgttcgaccacccaaccccacttgcggttgcggaacatctacgtgatcgtctaacatccggggaagataaccctatccccctatgtcaaggcgatggggaggagatgagcacatggctacgtcgttttggacccccagtcgaacatcgggccaggctagtgtgtttcccccacgcaggcgcagcggcggattcatacttagacctagcaagagcgttagcaccagagatcgatgttcatgctgttcaataccccggcaggcaagacagaagggacgaggagccattaggaaccgcaggtgaaattgcagatgaagtggcagcggtgctacgtgcgtcgggaggggatgggccttttgcacttttcggccacagtatgggcgccctcatcgcgtacgagacagcaaggcgattagagagggaaccgggagggggacccttacgtttattcgtgagcggacaaacagcgccacgtgtccatgaacgaagaactgatctgcccggtgacgatggactcgtggacgagcttaggcgacttggcacctccgaggcagcgctcgcagacgaagccctgctggctatgtctctcccggtgctcagggcggattatagggtgttaagatcctacgcttgggcggatggtcccccactacgcgccggtataactgccctctgcggtgatgcagacccactaactgcaacaggggatgcggaacgctggttacaacattccgtgattccgggtcggacacggacatttcccggtgggcatttttatttaggggaacaagtgaccgaggtggcaggggctgtccgtagagatttactgagagcagggttagcgggttga

SEQ ID NO: 135 - protein, 3997 aa, Artificial Sequence
  Ile-Ser-MalH
MVAKHSLENGVFHKMTENEKELILHFNNTKTDYPKNKTLHELFEEQAMKTPDHTALVFGAQRMTYRELNEKANQTARLLREKGIGRGSIAAIIADRSFEMIIGIIGILKAGGAYLPIDPETPKDRIAFMLSDTKAAVLLTQGKAADGIDCEADIVQLDREASDGFSKEPLSSVNDSGDTAYIIYTSGSTGTPKGVITPHYSVIRVVQNTNYIDITEDNVILQLSNYSFDGSVFDIFGALLNGASLVMIEKEALLNINRLGSAINEEKVSVMFITTALFNMIADIHVDCLSNLRKILFGGERASIPHVRKVLNHVGRDKLIHVYGPTESTVYATYYFINEIDDEAETIPIGSPLANTSVLIMDEAGKLVPIGVPGELCIAGDGLSKGYLNREELTAEKFIPHPFIPGERLYKTGDLAKWLPDGNIEFIGRIDHQVKIRGFRIELGEIESRLEMHEDINETIVTVREDEESRPYICAYITANREISLDELKGFLGEKLPEYMIPAYFVKLDKLPLTKNGKVDRKALPEPDRTAGAENEYEAPRNETEEKLAAVWQDVLHVEKAGIHDHFAQMGGHSLHAMELIAKIKEKMNVEIPLHQLFKLATIKELSAFIEANAIQTGASLSIPAIQSRSNRDQHLPLVAAQPGIWMAEKLSELPSAWSVAHYVELTGEVDSPLLARAVVAGLAQADTLRMRFTEDNGEVWQWVDDALTFELPEIIDLRTNIDPHGTAQALMQADLQQDLRVDSGKPLVFHQLIQVADNRWYWYQRYHHLLVDGFSFPAITRQIANIYCTWLRGEPTPASPFTPFADVVEEYQQYRESEAWQRDAAFWAEQRRQLPPPASLSPAPLPGRSASADILRLKLEFTDGEFRQLATQLSGVQRTDLALALAALWLGRLCNRMDYAAGFIFMRRLGSAALTATGPVLNVLPLGIHIGNPSFSELLTRVREVALGAYAHQHIPFEMLVEALQPERNLSHTPLFQVMFVLQNAPASQLELTGITANPIKVKSTTTKFDLTLIMQNTASGLVGVWEYNTDLFDASTIERMTGHFVTLLEGVIANPQQPISQLPILTTVEQQQLLVEWNNTQTDYPADKCIHQLFEEQVERTPDAVAVVFGNQQLSYREMREQVVALANLLRERGVKPGDSVAVALPRSVFLTLALHAIVEAGAAWLPLDTGYPDDRLKMMLEDARPSLLITTDDQLPRFSDVPNLTSLCYNAPLTPQGSAPLQLSQPHHTAYIIFTSGSTGRPKGVMVGQTAIVNRLLWMQNHYPLTGEDVVAQKTPCSFDVSVWEFFWPFIAGAKLVMAEPEAHRDPLAMQQFFAEYGVTTTHFVPSMLAAFVASLTPQTARQSCATLKQVFCSGEALPADLCREWQQLTGAPLHNLYGPTEAAVDVSWYPAFGEELAQVRGSSVPIGYPVWNTGLRILDAMMHPVPPGVAGDLYLTGIQLAQGYLGRPDLTASRFIADPFAPGERMYRTGDVARWLDNGAVEYLGRSDDQLKIRGQRIELGEIDRVMQALPDVEQAVASCAIAREDIPGNKHLVAYIVPQEEQTCTERSRSTLTVSFVRSFLKEKLPEYMVPSAIVILDALPLTPNGKLDRRALPAPDLHSQLETIIAAAFSSLLGCDVQDADADFFALGGHSLLAMKLAAQLSRQVARQVTPGQVMVASTVAKLATIIDAELDKYVAPRNPIPGIGALVPAPVVIAAGRTEEPIAIVSMACRLPGGVNTPQRLWELLREGGETLSGFPTDRGWDLARLHHPDPDNPGTSYVDKGGFLDDAAGFDAEFFGVSPREAAAMDPQQRLLLETSWELVENAGIDPHSLRGTATGVFLGVAKFGYGEDTAAAEDVEGYSVTGVAPAVASGRISYTMGLEGPSISVDTACSSSLVALHLAVESLRKGESSMAVVGGAAVMATPGVFVDFSRQRALAADGRSKAFGAGADGFGFSEGVTLVLLERLSEARRNGHEVLAVVRGSALNQDGASNGLSAPSGPAQRRVIRQALESCGLEPGDVDAVEAHGTGTALGDPIEANALLDTYGRDRDADRPLWLGSVKSNIGHTQAAAGVTGLLKVVLALRNGELPATLHVEEPTPHVDWSSGGVALLAGNQPWRRGERTRRAAVSAFGISGTNAHVIVEEAPQEVRPAPGQGLSPAVSTLVVAGKTMQRVSATAGMLADWMEGPGADVALADVAHTLNHHRSRQPKFGTVVARDRTQAIAGLRALAAGQHAPGVVNPAEGSPGPGTVFVFPGQGSQRAGMGEELAAAFPVFARIHQQVWDLLDVPDLDVNETGYAQPALFALQVALFGLLESWGVRPDAVVGHSVGELAAGYVSGLWSLEDACTLVSARARLMQALPAGGVMAAVPVSEDEARAVLGEGVEIAAVNGPSSVVLSGDEAAVLQAAEGLGKWTRLPTSHAFHSARMEPMLEEFRAVAEGLTYRTPQVAMAAGDQVMTAEYWVRQVRDTVRFGEQVASFEDAVFVELGADRSLARLVDGIAMLHGDHEAQAGMRREQPLPLGLRRLLTDLHNAGAAVDFSVLCPQGRLVDAPLPAWSHRFLFYDREGVDNRSPGGSTVAVHPLLLAAVDVPGHGGAVFTGRLSTDEQPWLAEHVVGGRTLVPGSVLVDLALAAGEDVGLPVLEELVLQRPLVLAGAGALLRMSVGAPDESGRRTIDVHAAEDVADLADAQWSQHATGTLAQGVAAGPRDTEQWPPEDAVRIPLDDHYDGLAEQGYEYGPSFQALVAYVAEDATATMLAEVALPGSIRSQQGLYAIHPALLDACFQSVGAHPDSQSVGSGLLVPLGVRRVRAYAPVRTARYCYTRVTKVELAGVEADIDVLDAHGTVLLAVCGLRIGTGVSERDKHNRVLNERLLTIEWHQRELPEMDPSGAGKWLLISDCAASDVTATRLADAFREHSAACTTMRWPLHDDQLAAADQLRDQVGSDEFSGVVVLTGPNTGTPHQGSADRGAEYVRRLVGIARELSDLPGAVPRMYVVTRGAQRVLADDCVNLEQGGLRGLLRTIGAEHPHLRATQIDVDEQTGVEQLARQLLATSEEDETAWRDNEWYVARLCPTPLRPQERRTIVADHQQSGMRLQIRTPGAIDSVAFEPAPDVEQPLRAGEVRVDVRATGVNFRDVLLALGMYPQKADMGTEAAGVVTAVGPDVDAFAPGDRVLGLFQGAFAPIAVTDHRLLARVPDGWSDADAAAVPIAYTTAHYALHDLAGLRAGQSVLIHAAAGGVGMAAVALARRAGAEVLATAGPAKHGTLRALGLDDEHIASSRETGFARKFRERTGGRGVDVVLNSLTGELLDESADLLAEDGVFVEMGKTDLRDAGDFRGRYAPFDLGEAGDDRLGEILREVVGLLGAGELDRLPVSAWELGIPQTGKSLVTLPPEQAQVFRPDGTVLITGGTGTLGRLLARHLVTEHGVRHLLLVSRRGADAPGSDELRAEIEDLGASAEIAACDTADRDALSALLDGLPRPLTGVVHAAGVLADGLVTSIDEPAVEQVLRAKVDAAWNLHELTANTGLSFFVLFSSAASVLAGPGQGVYAAANESLNALAALRRTRGLPAKALGWGLWAIGRAIAFAEQTGDAIAPEEGAYAFETLLRHNRAYSGYAPVIGSPWLTAFAQHSPFAEKFQSLGQNRSGTSKFLAELVDLPREEWPDRLRRLLELVRSHAAAVSGYGSADQLPERKAFKDLGFDSLAAVELRNRLGTATGVRLPSTLVFDHPTPLAVAEHLRDRLTSGEDNPIPLCQGDGEEMSTWLRRFGPPVEHRARLVCFPHAGAAADSYLDLARALAPEIDVHAVQYPGRQDRRDEEPLGTAGEIADEVAAVLRASGGDGPFALFGHSMGALIAYETARRLEREPGGGPLRLFVSGQTAPRVHERRTDLPGDDGLVDELRRLGTSEAALADEALLAMSLPVLRADYRVLRSYAWADGPPLRAGITALCGDADPLTATGDAERWLQHSVIPGRTRTFPGGHFYLGEQVTEVAGAVRRDLLRAGLAG

SEQ ID NO: 136 - DNA, 8787 bp, Artificial Sequence
  Ac-Ser-Ser
atgaacccaccctgcgggccagtccgtgcgaattgcgtacacatatccatagatttccccatgccagtttccaaagtttccggtcctcgatcaaggacaaccagccggaggacacccgtccggattggggccgtggtggtggcaagctcgactagcgaactccttgatgggctcgcagcggttgctgatggtaggccacacgccagcgtagttaggggcgttgcgcgcccttctgcgccggttgtattcgttttcccaggtcaaggagcgcaatgggctgggatggcgggggagctactcggggagagtcgggtctttgcagccgctatggacgcctgcgcgagggcgttcgaacctgtaaccgattggacattggcccaagttttggattcaccagagcaatcccggcgtgtagaggtcgtccaacccgccctttttgcagtgcagacctctttggctgcactctggagatctttcggcgtgacacccgacgcagtcgtagggcactctatcggggagcttgcggcggcgcacgtctgtggggcagccggggcagctgacgcggcaagagctgccgcactgtggtcacgagaaatgatcccactagtggggaacggtgacatggcggcggttgcactctcggcagatgagattgaaccacggatcgcccgttgggacgacgacgtcgtgcttgctggtgttaatggtccccgctcggttttactaaccggcagccctgaaccagtagcaagaagggtacaagaactttcggcagagggagttcgggcacaggtcattaatgtgagcatggcggcccattccgcgcaggtggacgatattgcagaagggatgagatcggctctggcgtggtttgccccaggcgggtccgaagttccattttacgccagcctcactgggggagccgtggacacgcgagaactcgttgcggattactggcgacgctcattcagactgcccgttcgtttcgatgaagctataagatcagccctggaagttgggccaggtacattcgtcgaggcctcaccccacccagtcctggcggctgccctacagcagacactggacgcagaggggtcgtcggcagcggtggtccccacattacagcgggggcaaggcggaatgcgtcggttcctcttggcagcggcacaggcattcactggaggagtggccgtcgattggaccgcggcctatgatgatgtggggcctaacccggccctatgtcgatcgtctcggcgcccaagacggaaaacttcgcgaccgtcaccagcttcgacgggaacaagacatagaacttgctgcgaacggctgctcgccgtcgtgaacggcgaaactgccgcattagccggacgtgaagcagatgcagaggcaacctttcgagagcttgggttagattccgttctggcggcccagctcagagctaaagtatccgcggcgataggtcgagaagtcaatattgcactactctatgaccacccaaccccgagagcactcgcagaggcacttgctgccattcagacaggcgcatcactgtcaattccggcaatccaatcgcgcagcaaccgtgaccagcacttgcccttagtagctgcgcaacctggaatatggatggccgagaagttatctgaactaccatcagcgtggagcgtagcgcattacgtggagctcactggtgaggttgactcgcctcttttggccagggcggtagtggctggccttgcacaagctgacaccttaagaatgcgtttcacagaggataatggggaagtttggcaatgggtagacgatgcgttaacatttgagttaccggaaatcatagacctgcgcactaacatagaccctcacgggacagctcaggccttgatgcaagcggacctgcaacaggacctacgtgtggattcggggaagcctctggtcttccatcagctaattcaagtagcggacaatcgctggtactggtatcaaaggtaccaccacttgcttgtggacgggttcagttttccagcgataaccaggcaaatagccaacatttattgcacttggttgcgaggagagcctacgcccgcatcccccttcacgccattcgcagacgttgttgaggaataccaacagtatcgcgagagcgaagcgtggcaacgcgatgcggcattctgggcggagcaacgacggcaactaccgcctcccgcatccctatcacctgccccgctccccggccggtccgcgtcagccgacattctacggctaaagctggagttcacagatggtgaatttcgacagcttgctacacaactcagcggggtacaaaggacagacctagcgctcgctctggctgcattatggctaggacgactttgcaatcgaatggactacgcggcgggtttcatatttatgcgccggctcggcagcgcagcgttgaccgcaacgggtccagttttaaatgttcttcctttgggaatccacataggcaacccaagcttctctgagcttctcaccagggttcgcgaggtcgccttaggcgcgtatgcacaccaacatattccttttgagatgttagtagaggcactgcaaccagagcgaaaccttagccatactcctctcttccaagtgatgtttgtccttcagaatgcgcccgcgtcccaattagagttaaccgggatcaccgcaaacccaattaaggttaaatcaactaccacgaagttcgacctaactttaatcatgcaaaacacagctagcggattagtaggtgtttgggagtacaacacggatttattcgacgcgtcaacgattgagcgaatgacagggcactttgtaaccctcctcgagggcgttatcgccaatccacaacagccgatctctcaacttcctattttaactacagtggagcaacagcaacttttagtcgagtggaataacacgcaaaccgactaccccgctgataagtgtatacatcaattattcgaggaacaggtcgagcgcacaccagacgccgttgctgtcgtctttgggaatcagcaactcagctatcgagagatgcgcgaacaagtggttgcactcgccaatttattacgtgagcggggagtcaagccaggagactccgttgccgtggccttaccacgctctgttttcttaacccttgcactacacgcgattgtcgaggcaggtgccgcctggctacctcttgacacaggatatcctgacgatagattaaaaatgatgctcgaggatgcacggccttcccttctgatcacaacagacgatcaattaccccgcttcagtgacgtacctaatctgacctcactctgttacaacgctcccttgacgcctcaagggagcgcccctttacagctgtctcaacctcaccatactgcatatatcatctttacaagtggttctacgggacgccccaagggagtaatggttggtcagactgcgattgtaaatcgtctgttgtggatgcaaaaccactaccctttgacgggggaggacgttgtagcccaaaagactccttgctcgttcgatgtctcagtctgggagttcttttggccatttatagcaggggccaaattagttatggcggagccggaagcccaccgagacccacttgcgatgcagcaattctttgctgagtatggtgtcaccactacacatttcgtcccatcgatgttagcggccttcgtggcttctcttactccacaaacggctaggcaatcttgtgccacactaaagcaagtcttctgctccggcgaggcattacctgcagacttgtgccgggaatggcagcaactcacaggagctccattgcacaatctatacggaccgaccgaggccgcagtagacgtatcttggtatcctgcgtttggcgaggagttagcgcaagtaagaggttcgtcagtaccaataggataccccgtatggaacacggggcttcggatactggacgcgatgatgcatccggtcccaccaggagtcgcgggcgatttatacctgactgggatacagctggcccaaggttacctagggagacctgaccttacggcgtcgaggttcatagcggatccgtttgctccgggtgagcgcatgtaccgtacgggcgacgtcgcgcgatggctagataatggcgccgtagagtatcttggtagatcagacgatcagttaaagatacggggacaacgaatagagcttggggaaatagaccgggtaatgcaggctttgccagatgtcgagcaagcggtggcttcgtgtgctattgcgcgggaggacatacctgggaacaaacaccttgtagcgtacatagttcctcaagaggagcaaacatgcactgagcgatcgaggtccacacttacagtttcgttcgtccggagtttccttaaggagaaactccccgaatatatggtaccgagcgcaatagtgattctagacgctctccccctgactcctaatggaaagctagaccggcgggcgttacccgcccctgacctgcactcacaacttgagacaattattgctgcggctttctcgagcctgctcgggtgcgacgtacaagacgcggatgctgactttttcgcgctaggtggccattcgctgcttgccatgaagctagccgctcagctttcccgacaagtagcgcggcaggtgacaccaggccaagttatggtagcttcgactgtcgcaaagctcgcaacgatcatagacgcggagttagataaatacgtcgctccaaggaacccgatattggcttccgctcgtgctccgcgtgacgtccgccaaacagctcacgctgacgctgctgaaccggctggcgacgacggccttcagcacttgcccttagtagctgcgcaacctggaatatggatggccgagaagttatctgaactaccatcagcgtggagcgtagcgcattacgtggagctcactggtgaggttgactcgcctcttttggccagggcggtagtggctggccttgcacaagctgacaccttaagaatgcgtttcacagaggataatggggaagtttggcaatgggtagacgatgcgttaacatttgagttaccggaaatcatagacctgcgcactaacatagaccctcacgggacagctcaggccttgatgcaagcggacctgcaacaggacctacgtgtggattcggggaagcctctggtcttccatcagctaattcaagtagcggacaatcgctggtactggtatcaaaggtaccaccacttgcttgtggacgggttcagttttccagcgataaccaggcaaatagccaacatttattgcacttggttgcgaggagagcctacgcccgcatcccccttcacgccattcgcagacgttgttgaggaataccaacagtatcgcgagagcgaagcgtggcaacgcgatgcggcattctgggcggagcaacgacggcaactaccgcctcccgcatccctatcacctgccccgctccccggccggtccgcgtcagccgacattctacggctaaagctggagttcacagatggtgaatttcgacagcttgctacacaactcagcggggtacaaaggacagacctagcgctcgctctggctgcattatggctaggacgactttgcaatcgaatggactacgcggcgggtttcatatttatgcgccggctcggcagcgcagcgttgaccgcaacgggtccagttttaaatgttcttcctttgggaatccacataggcaacccaagcttctctgagcttctcaccagggttcgcgaggtcgccttaggcgcgtatgcacaccaacatattccttttgagatgttagtagaggcactgcaaccagagcgaaaccttagccatactcctctcttccaagtgatgtttgtccttcagaatgcgcccgcgtcccaattagagttaaccgggatcaccgcaaacccaattaaggttaaatcaactaccacgaagttcgacctaactttaatcatgcaaaacacagctagcggattagtaggtgtttgggagtacaacacggatttattcgacgcgtcaacgattgagcgaatgacagggcactttgtaaccctcctcgagggcgttatcgccaatccacaacagccgatctctcaacttcctattttaactacagtggagcaacagcaacttttagtcgagtggaataacacgcaaaccgactaccccgctgataagtgtatacatcaattattcgaggaacaggtcgagcgcacaccagacgccgttgctgtcgtctttgggaatcagcaactcagctatcgagagatgcgcgaacaagtggttgcactcgccaatttattacgtgagcggggagtcaagccaggagactccgttgccgtggccttaccacgctctgttttcttaacccttgcactacacgcgattgtcgaggcaggtgccgcctggctacctcttgacacaggatatcctgacgatagattaaaaatgatgctcgaggatgcacggccttcccttctgatcacaacagacgatcaattaccccgcttcagtgacgtacctaatctgacctcactctgttacaacgctcccttgacgcctcaagggagcgcccctttacagctgtctcaacctcaccatactgcatatatcatctttacaagtggttctacgggacgccccaagggagtaatggttggtcagactgcgattgtaaatcgtctgttgtggatgcaaaaccactaccctttgacgggggaggacgttgtagcccaaaagactccttgctcgttcgatgtctcagtctgggagttcttttggccatttatagcaggggccaaattagttatggcggagccggaagcccaccgagacccacttgcgatgcagcaattctttgctgagtatggtgtcaccactacacatttcgtcccatcgatgttagcggccttcgtggcttctcttactccacaaacggctaggcaatcttgtgccacactaaagcaagtcttctgctccggcgaggcattacctgcagacttgtgccgggaatggcagcaactcacaggagctccattgcacaatctatacggaccgaccgaggccgcagtagacgtatcttggtatcctgcgtttggcgaggagttagcgcaagtaagaggttcgtcagtaccaataggataccccgtatggaacacggggcttcggatactggacgcgatgatgcatccggtcccaccaggagtcgcgggcgatttatacctgactgggatacagctggcccaaggttacctagggagacctgaccttacggcgtcgaggttcatagcggatccgtttgctccgggtgagcgcatgtaccgtacgggcgacgtcgcgcgatggctagataatggcgccgtagagtatcttggtagatcagacgatcagttaaagatacggggacaacgaatagagcttggggaaatagaccgggtaatgcaggctttgccagatgtcgagcaagcggtggcttcgtgtgctattgcgcgggaggacatacctgggaacaaacaccttgtagcgtacatagttcctcaagaggagcaaacatgcactgagcgatcgaggtccacacttacagtttcgttcgtccggagtttccttaaggagaaactccccgaatatatggtaccgagcgcaatagtgattctagacgctctccccctgactcctaatggaaagctagaccggcgggcgttacccgcccctgacctgcactcacaacttgagacaattattgctgcggctttctcgagcctgctcgggtgcgacgtacaagacgcggatgctgactttttcgcgctaggtggccattcgctgcttgccatgaagctagccgctcagctttcccgacaagtagcgcggcaggtgacaccaggccaagttatggtagcttcgactgtcgcaaagctcgcaacgatcatagacgcggagttagataaatacgtcgctccaaggaacccgataacatccggggaagataaccctatccccctatgtcaaggcgatggggaggagatgagcacatggctacgtcgttttggacccccagtcgaacatcgggccaggctagtgtgtttcccccacgcaggcgcagcggcggattcatacttagacctagcaagagcgttagcaccagagatcgatgttcatgctgttcaataccccggcaggcaagacagaagggacgaggagccattaggaaccgcaggtgaaattgcagatgaagtggcagcggtgctacgtgcgtcgggaggggatgggccttttgcacttttcggccacagtatgggcgccctcatcgcgtacgagacagcaaggcgattagagagggaaccgggagggggacccttacgtttattcgtgagcggacaaacagcgccacgtgtccatgaacgaagaactgatctgcccggtgacgatggactcgtggacgagcttaggcgacttggcacctccgaggcagcgctcgcagacgaagccctgctggctatgtctctcccggtgctcagggcggattatagggtgttaagatcctacgcttgggcggatggtcccccactacgcgccggtataactgccctctgcggtgatgcagacccactaactgcaacaggggatgcggaacgctggttacaacattccgtgattccgggtcggacacggacatttcccggtgggcatttttatttaggggaacaagtgaccgaggtggcaggggctgtccgtagagatttactgagagcagggttagcgggttga

SEQ ID NO: 137 - protein, 2928 aa, Artificial Sequence
  Ac-Ser-Ser
MNPPCGPVRANCVHISIDFPMPVSKVSGPRSRTTSRRTPVRIGAVVVASSTSELLDGLAAVADGRPHASVVRGVARPSAPVVFVFPGQGAQWAGMAGELLGESRVFAAAMDACARAFEPVTDWTLAQVLDSPEQSRRVEVVQPALFAVQTSLAALWRSFGVTPDAVVGHSIGELAAAHVCGAAGAADAARAAALWSREMIPLVGNGDMAAVALSADEIEPRIARWDDDVVLAGVNGPRSVLLTGSPEPVARRVQELSAEGVRAQVINVSMAAHSAQVDDIAEGMRSALAWFAPGGSEVPFYASLTGGAVDTRELVADYWRRSFRLPVRFDEAIRSALEVGPGTFVEASPHPVLAAALQQTLDAEGSSAAVVPTLQRGQGGMRRFLLAAAQAFTGGVAVDWTAAYDDVGPNPALCRSSRRPRRKTSRPSPASTGTRHRTCCERLLAVVNGETAALAGREADAEATFRELGLDSVLAAQLRAKVSAAIGREVNIALLYDHPTPRALAEALAAIQTGASLSIPAIQSRSNRDQHLPLVAAQPGIWMAEKLSELPSAWSVAHYVELTGEVDSPLLARAVVAGLAQADTLRMRFTEDNGEVWQWVDDALTFELPEIIDLRTNIDPHGTAQALMQADLQQDLRVDSGKPLVFHQLIQVADNRWYWYQRYHHLLVDGFSFPAITRQIANIYCTWLRGEPTPASPFTPFADVVEEYQQYRESEAWQRDAAFWAEQRRQLPPPASLSPAPLPGRSASADILRLKLEFTDGEFRQLATQLSGVQRTDLALALAALWLGRLCNRMDYAAGFIFMRRLGSAALTATGPVLNVLPLGIHIGNPSFSELLTRVREVALGAYAHQHIPFEMLVEALQPERNLSHTPLFQVMFVLQNAPASQLELTGITANPIKVKSTTTKFDLTLIMQNTASGLVGVWEYNTDLFDASTIERMTGHFVTLLEGVIANPQQPISQLPILTTVEQQQLLVEWNNTQTDYPADKCIHQLFEEQVERTPDAVAVVFGNQQLSYREMREQVVALANLLRERGVKPGDSVAVALPRSVFLTLALHAIVEAGAAWLPLDTGYPDDRLKMMLEDARPSLLITTDDQLPRFSDVPNLTSLCYNAPLTPQGSAPLQLSQPHHTAYIIFTSGSTGRPKGVMVGQTAIVNRLLWMQNHYPLTGEDVVAQKTPCSFDVSVWEFFWPFIAGAKLVMAEPEAHRDPLAMQQFFAEYGVTTTHFVPSMLAAFVASLTPQTARQSCATLKQVFCSGEALPADLCREWQQLTGAPLHNLYGPTEAAVDVSWYPAFGEELAQVRGSSVPIGYPVWNTGLRILDAMMHPVPPGVAGDLYLTGIQLAQGYLGRPDLTASRFIADPFAPGERMYRTGDVARWLDNGAVEYLGRSDDQLKIRGQRIELGEIDRVMQALPDVEQAVASCAIAREDIPGNKHLVAYIVPQEEQTCTERSRSTLTVSFVRSFLKEKLPEYMVPSAIVILDALPLTPNGKLDRRALPAPDLHSQLETIIAAAFSSLLGCDVQDADADFFALGGHSLLAMKLAAQLSRQVARQVTPGQVMVASTVAKLATIIDAELDKYVAPRNPILASARAPRDVRQTAHADAAEPAGDDGLQHLPLVAAQPGIWMAEKLSELPSAWSVAHYVELTGEVDSPLLARAVVAGLAQADTLRMRFTEDNGEVWQWVDDALTFELPEIIDLRTNIDPHGTAQALMQADLQQDLRVDSGKPLVFHQLIQVADNRWYWYQRYHHLLVDGFSFPAITRQIANIYCTWLRGEPTPASPFTPFADVVEEYQQYRESEAWQRDAAFWAEQRRQLPPPASLSPAPLPGRSASADILRLKLEFTDGEFRQLATQLSGVQRTDLALALAALWLGRLCNRMDYAAGFIFMRRLGSAALTATGPVLNVLPLGIHIGNPSFSELLTRVREVALGAYAHQHIPFEMLVEALQPERNLSHTPLFQVMFVLQNAPASQLELTGITANPIKVKSTTTKFDLTLIMQNTASGLVGVWEYNTDLFDASTIERMTGHFVTLLEGVIANPQQPISQLPILTTVEQQQLLVEWNNTQTDYPADKCIHQLFEEQVERTPDAVAVVFGNQQLSYREMREQVVALANLLRERGVKPGDSVAVALPRSVFLTLALHAIVEAGAAWLPLDTGYPDDRLKMMLEDARPSLLITTDDQLPRFSDVPNLTSLCYNAPLTPQGSAPLQLSQPHHTAYIIFTSGSTGRPKGVMVGQTAIVNRLLWMQNHYPLTGEDVVAQKTPCSFDVSVWEFFWPFIAGAKLVMAEPEAHRDPLAMQQFFAEYGVTTTHFVPSMLAAFVASLTPQTARQSCATLKQVFCSGEALPADLCREWQQLTGAPLHNLYGPTEAAVDVSWYPAFGEELAQVRGSSVPIGYPVWNTGLRILDAMMHPVPPGVAGDLYLTGIQLAQGYLGRPDLTASRFIADPFAPGERMYRTGDVARWLDNGAVEYLGRSDDQLKIRGQRIELGEIDRVMQALPDVEQAVASCAIAREDIPGNKHLVAYIVPQEEQTCTERSRSTLTVSFVRSFLKEKLPEYMVPSAIVILDALPLTPNGKLDRRALPAPDLHSQLETIIAAAFSSLLGCDVQDADADFFALGGHSLLAMKLAAQLSRQVARQVTPGQVMVASTVAKLATIIDAELDKYVAPRNPITSGEDNPIPLCQGDGEEMSTWLRRFGPPVEHRARLVCFPHAGAAADSYLDLARALAPEIDVHAVQYPGRQDRRDEEPLGTAGEIADEVAAVLRASGGDGPFALFGHSMGALIAYETARRLEREPGGGPLRLFVSGQTAPRVHERRTDLPGDDGLVDELRRLGTSEAALADEALLAMSLPVLRADYRVLRSYAWADGPPLRAGITALCGDADPLTATGDAERWLQHSVIPGRTRTFPGGHFYLGEQVTEVAGAVRRDLLRAGLAG

SEQ ID NO: 138 - DNA, 10356 bp, Artificial Sequence
  Ile-MalOH-Ser
atggttgccaaacatagtctggaaaacggtgtctttcacaagatgactgaaaacgagaaggaattgatccttcatttcaacaacactaagacagattaccctaagaacaagacgttgcatgaactttttgaagagcaggcaatgaaaaccccggatcacacagcactggtgttcggcgctcagagaatgacctacagggaactgaacgagaaggcgaatcaaacggcccgtctgttacgcgaaaaagggatcggacgtggcagcattgcggccattatcgcagatcgctcttttgaaatgatcatcggaatcatcggcatcctaaaggcaggcggtgcttatctgccgattgacccagaaaccccgaaagatcgtatcgcgttcatgctgagcgataccaaggcagctgtattgcttacgcagggaaaagcggccgatggcattgactgcgaagcggatatcgtgcaactggaccgtgaagccagcgatggtttttctaaagagccgctgagctctgttaatgatagtggcgacaccgcgtatattatctacacgagtggttccaccgggaccccgaaaggtgtgattaccccgcattattccgttatccgcgtggttcagaacactaactacatcgatatcacagaagacaacgtaatcctccaactatcaaactactcgttcgacggtagtgtgtttgatattttcggtgcgctcctaaacggggcctccctggtgatgatcgagaaagaagcactgttaaacattaatcgtctgggctcagctatcaatgaagagaaagtgagcgtgatgtttattaccacggcgctgttcaacatgattgccgatatccatgttgactgcctctcaaacctgcgtaaaattctgtttggcggcgaacgagcttcgatcccacatgtccgcaaggtactgaaccacgtcggtcgcgataaattaattcacgtatatggcccgactgaatcaacagtgtacgccacctattacttcataaacgaaattgatgacgaggcggaaactatccccataggtagcccgctggccaataccagcgtgctgattatggacgaagcaggcaaactggtcccaattggagtacctggcgaactgtgtatcgctggtgatgggttgtctaaaggttatcttaaccgtgaagagctcaccgcggaaaaatttatcccgcatccattcattcccggtgaacgtctgtacaagacgggcgaccttgccaaatggctcccagatggaaatatcgaatttataggccgcattgatcatcaggttaaaatccgtggctttcgaattgaactgggggagatcgaaagccgtttagaaatgcacgaggacatcaacgaaaccattgtgacggttcgcgaggatgaagagagccggccgtatatctgtgcatacattaccgctaatcgtgaaatttctcttgatgagctcaagggttttctgggggaaaaattacccgagtatatgatcccggcgtacttcgttaagctggataaactgccgttaacgaagaatggtaaagtcgaccggaaagccctgcctgaacccgatcgtactgcgggcgccgagaacgaatatgaggcaccgcgcaatgaaacagaagagaaactggcagctgtctggcaggacgtgttacatgttgaaaaagcaggcattcatgatcactttgctcaaatgggcggtcattcattgcacgcaatggaacttatcgctaagatcaaggaaaagatgaacgttgagatcccgctgcaccagttatttaagttggcgaccattaaagaactgtcggcgttcatcgaggccaatggcctaccccaggaaattaaacacacgccggcggttcggaccacatccgaagatccaattgccatcgtttcgatggcatgtcgtttaccgggaggagtcaatacgccccaacggctctgggaattactacgggagggtggtgaaaccttgtccgggttcccaacggaccgtggctgggacctagcacggcttcaccaccctgatccggacaaccccggaacgagctacgttgataagggtggatttctcgacgacgcggcgggtttcgacgcagagtttttcggggtttcaccaagggaagctgccgctatggaccctcagcaacgattacttttagagacctcgtgggagctagttgaaaatgcgggcatagatccacatagcctgcgagggacagcgacaggggtgttcctaggagttgcgaagtttggttatggtgaggacacagcagcagcggaagatgttgaaggttattcagttaccggtgttgctcccgctgtggcatctggccgcatatcctacactatgggtttagaaggtccttccatctcggtcgataccgcatgctcaagctcgctagtcgcgcttcatctagccgtagagtccctccgaaagggtgagtcatctatggcggtggtgggtggtgcagccgttatggcgactcctggggtatttgttgatttttcacgccaacgggcgcttgccgcagacggccgttccaaagcgttcggggcaggtgcagatggttttggtttcagcgagggagtcacgctggttctactagagcgtttaagtgaggcgcgtcgtaacggtcatgaagttctagctgtagtgcgcgggtccgcgttaaaccaggacggagcgagcaacggactttcagcaccctccggccctgcgcaacgtagagtaataaggcaagcgctcgaatcgtgtgggcttgaaccgggggatgttgacgcggttgaggcgcatggtactggtacagcactaggtgacccaatagaggccaatgcgctgttggacacttacgggcgagaccgtgatgcggatcgtccactttggttggggtccgttaagagcaatattgggcacactcaagctgcggccggggttacaggactgctgaaggttgtgttagcactgcgcaatggtgagctacctgcaacgttacatgtcgaggaaccaactccacacgtcgattggtcctcaggtggtgtcgcattactggcgggtaatcaaccatggcgaaggggagaaaggaccagaagggcggcagtgagcgcctttggtatctccggtacaaatgctcacgtgatagtggaagaggcgcctcaggaagttcgacccgcccctggccaagggctgtcgccagccgtgtccacgttagttgttgcaggtaaaaccatgcagcgtgtaagtgcgacagctggaatgcttgcagactggatggagggtcctggggccgatgttgcattggcggatgtggcccataccctgaaccatcaccgatcaagacagcccaagttcgggacggttgtagcgcgtgacaggactcaggcgatagctgggctccgtgcattggcggctggtcaacatgctcctggggtcgtcaacccagctgaaggttccccaggaccaggcaccgtgttcgtttttcccggtcaaggttcgcagagggcagggatgggggaggaactcgcggcagcctttcctgtcttcgctcgaatacatcagcaagtttgggacctcctagatgttcccgacctcgacgttaatgaaaccgggtacgcccaaccagcgctgttcgcgcttcaggtcgcgctctttggccttctggagtcgtggggtgttaggccagatgcagtggtagggcactcagttggtgagctggccgcggggtacgtgtccggtctttggtcactagaggacgcctgcacactagtctcagcaagagcgcgcctaatgcaggcactgcctgctggaggggtgatggcggcagtccccgtctccgaggatgaggcgcgggccgtcctgggcgagggagttgaaattgcggctgtgaatggaccctcgtccgttgtgctctcaggggacgaggcggcagtcttacaggccgccgaaggtctaggtaagtggacgcgactgccgaccagccatgcttttcactcagcgagaatggaacccatgctagaagagtttcgggccgtagcagagggtctgacctatcgtacccctcaagtagctatggctgctggggatcaggtgatgacagcagaatattgggtgcggcaggttcgggacacagttcgcttcggggagcaagtagcgtcattcgaggatgcggtgtttgttgagttaggcgctgacagaagtctagcgcgtttggtggacggcatcgccatgctgcacggtgaccacgaagcgcaggccgcggaccataggcaaatcaccgaagcggttgcggatgcttacgtcttaggccaccttccggattttgcggcgctgcggcggcctcacgcacgaaagttggacttaccaacttatcccttcgagcgtagacagtactggttcagagatgcgcgtgagaggccggaacaacccagagataccggcggacctcgcacagaagcagtccgtctgttagaggatggtaggattgaagaattagctgcacttttgggaggggccagtgatgaccaacacacattacaggtgctgactaagttggcggcgcaacataaccaacaacgaacaacccggtcaatcgctgacgacaggtacgaaataaggtgggaccgatcgacttccccactatccggagcagatgttgaccaagcggggagctggatcgtggtgtcagatgacgcagatgccgttcccccgctagtggacttgctggctgcacgtaacgagccccatcaggttgttggtctacccgcttcggacgcagacgaggagaggctcgcagagactctgcgtgcggctgcgactgaagatgctacccttcggatagtccacgttgcggcgctcgaagcaggcgctacccccagcatgcgttcactgctccgcatgcagcaccgaatactaggtggcacgcggcgggtgttcagggcagcggtcgcagcggagttaagaggtcccatttggatagtgacgcggggagcacaaagagtggctgacaccgatacagttgccccgcatcagtcatgcctctggggatttgggagggcagcatcgctggagctgccgcacgtttggggtggcctagcagatttatcagagggcggtgacaatgcggccgatgagtggagtgcgctagtggaccgcattgccgcaccccacggttcagcagttagggaggaccaactggcgctgagagacagggccgtatatacgccaagactggccagacgttctgcgcccccgagcgggactcccctacatctacgaggggatggcacagtgttaataacaggtgggactggtacactaggtaggctattagcgcgtcacctagtaacagagcatggggtgcggcatctcttactagtttcaaggagaggcgccgatgcccctggctcggatgaactgcgcgcagaaatagaggacttaggtgccagcgcggagatcgcagcgtgtgatacagcggatcgcgatgccctatctgccctactagatggtctcccccggccccttacgggtgtcgttcacgccgctggcgtgttagccgatggacttgtcactagcattgacgagcctgcggtggaacaggttctccgagcaaaggtggacgcggcatggaacctacacgaactcacagctaataccgggctatcctttttcgttcttttctcatcagcagcatcggtcctggcaggtccagggcaaggagtttatgcggctgcaaatgaatcgctcaacgcactagctgcgttaaggcgaactaggggtctgccggccaaggctctgggatggggcctgtgggccatcgggcgggcaatcgcttttgcggagcagaccggggacgccatcgctccagaggaaggagcatacgcttttgaaactctgttaaggcataaccgtgcctactcgggatatgcgcccgtcattggatctccctggttgaccgcgttcgcacagcattccccctttgcagaaaaattccaatcactcggacagaatcggtcagggacatcgaaattcttagcggagctagttgacctgcctcgtgaggaatggccggataggctcaggagactactagagttagttaggtcccatgccgccgcggtctccggttacggtagtgcagatcaactgccggaaagaaaagcgttcaaggatttggggtttgattcgctggccgccgttgaactgcgtaaccggctgggaacggctacaggggtacgactgccgtcaaccctagtatttgatcacccaactccgctggccgtcgctgagcacttaagagataggctattggcttccgctcgtgctccgcgtgacgtccgccaaacagctcacgctgacgctgctgaaccggctggcgacgacggccttcagcacttgcccttagtagctgcgcaacctggaatatggatggccgagaagttatctgaactaccatcagcgtggagcgtagcgcattacgtggagctcactggtgaggttgactcgcctcttttggccagggcggtagtggctggccttgcacaagctgacaccttaagaatgcgtttcacagaggataatggggaagtttggcaatgggtagacgatgcgttaacatttgagttaccggaaatcatagacctgcgcactaacatagaccctcacgggacagctcaggccttgatgcaagcggacctgcaacaggacctacgtgtggattcggggaagcctctggtcttccatcagctaattcaagtagcggacaatcgctggtactggtatcaaaggtaccaccacttgcttgtggacgggttcagttttccagcgataaccaggcaaatagccaacatttattgcacttggttgcgaggagagcctacgcccgcatcccccttcacgccattcgcagacgttgttgaggaataccaacagtatcgcgagagcgaagcgtggcaacgcgatgcggcattctgggcggagcaacgacggcaactaccgcctcccgcatccctatcacctgccccgctccccggccggtccgcgtcagccgacattctacggctaaagctggagttcacagatggtgaatttcgacagcttgctacacaactcagcggggtacaaaggacagacctagcgctcgctctggctgcattatggctaggacgactttgcaatcgaatggactacgcggcgggtttcatatttatgcgccggctcggcagcgcagcgttgaccgcaacgggtccagttttaaatgttcttcctttgggaatccacataggcaacccaagcttctctgagcttctcaccagggttcgcgaggtcgccttaggcgcgtatgcacaccaacatattccttttgagatgttagtagaggcactgcaaccagagcgaaaccttagccatactcctctcttccaagtgatgtttgtccttcagaatgcgcccgcgtcccaattagagttaaccgggatcaccgcaaacccaattaaggttaaatcaactaccacgaagttcgacctaactttaatcatgcaaaacacagctagcggattagtaggtgtttgggagtacaacacggatttattcgacgcgtcaacgattgagcgaatgacagggcactttgtaaccctcctcgagggcgttatcgccaatccacaacagccgatctctcaacttcctattttaactacagtggagcaacagcaacttttagtcgagtggaataacacgcaaaccgactaccccgctgataagtgtatacatcaattattcgaggaacaggtcgagcgcacaccagacgccgttgctgtcgtctttgggaatcagcaactcagctatcgagagatgcgcgaacaagtggttgcactcgccaatttattacgtgagcggggagtcaagccaggagactccgttgccgtggccttaccacgctctgttttcttaacccttgcactacacgcgattgtcgaggcaggtgccgcctggctacctcttgacacaggatatcctgacgatagattaaaaatgatgctcgaggatgcacggccttcccttctgatcacaacagacgatcaattaccccgcttcagtgacgtacctaatctgacctcactctgttacaacgctcccttgacgcctcaagggagcgcccctttacagctgtctcaacctcaccatactgcatatatcatctttacaagtggttctacgggacgccccaagggagtaatggttggtcagactgcgattgtaaatcgtctgttgtggatgcaaaaccactaccctttgacgggggaggacgttgtagcccaaaagactccttgctcgttcgatgtctcagtctgggagttcttttggccatttatagcaggggccaaattagttatggcggagccggaagcccaccgagacccacttgcgatgcagcaattctttgctgagtatggtgtcaccactacacatttcgtcccatcgatgttagcggccttcgtggcttctcttactccacaaacggctaggcaatcttgtgccacactaaagcaagtcttctgctccggcgaggcattacctgcagacttgtgccgggaatggcagcaactcacaggagctccattgcacaatctatacggaccgaccgaggccgcagtagacgtatcttggtatcctgcgtttggcgaggagttagcgcaagtaagaggttcgtcagtaccaataggataccccgtatggaacacggggcttcggatactggacgcgatgatgcatccggtcccaccaggagtcgcgggcgatttatacctgactgggatacagctggcccaaggttacctagggagacctgaccttacggcgtcgaggttcatagcggatccgtttgctccgggtgagcgcatgtaccgtacgggcgacgtcgcgcgatggctagataatggcgccgtagagtatcttggtagatcagacgatcagttaaagatacggggacaacgaatagagcttggggaaatagaccgggtaatgcaggctttgccagatgtcgagcaagcggtggcttcgtgtgctattgcgcgggaggacatacctgggaacaaacaccttgtagcgtacatagttcctcaagaggagcaaacatgcactgagcgatcgaggtccacacttacagtttcgttcgtccggagtttccttaaggagaaactccccgaatatatggtaccgagcgcaatagtgattctagacgctctccccctgactcctaatggaaagctagaccggcgggcgttacccgcccctgacctgcactcacaacttgagacaattattgctgcggctttctcgagcctgctcgggtgcgacgtacaagacgcggatgctgactttttcgcgctaggtggccattcgctgcttgccatgaagctagccgctcagctttcccgacaagtagcgcggcaggtgacaccaggccaagttatggtagcttcgactgtcgcaaagctcgcaacgatcatagacgcggagttagataaatacgtcgctccaaggaacccgataacatccggggaagataaccctatccccctatgtcaaggcgatggggaggagatgagcacatggctacgtcgttttggacccccagtcgaacatcgggccaggctagtgtgtttcccccacgcaggcgcagcggcggattcatacttagacctagcaagagcgttagcaccagagatcgatgttcatgctgttcaataccccggcaggcaagacagaagggacgaggagccattaggaaccgcaggtgaaattgcagatgaagtggcagcggtgctacgtgcgtcgggaggggatgggccttttgcacttttcggccacagtatgggcgccctcatcgcgtacgagacagcaaggcgattagagagggaaccgggagggggacccttacgtttattcgtgagcggacaaacagcgccacgtgtccatgaacgaagaactgatctgcccggtgacgatggactcgtggacgagcttaggcgacttggcacctccgaggcagcgctcgcagacgaagccctgctggctatgtctctcccggtgctcagggcggattatagggtgttaagatcctacgcttgggcggatggtcccccactacgcgccggtataactgccctctgcggtgatgcagacccactaactgcaacaggggatgcggaacgctggttacaacattccgtgattccgggtcggacacggacatttcccggtgggcatttttatttaggggaacaagtgaccgaggtggcaggggctgtccgtagagatttactgagagcagggttagcgggttga

SEQ ID NO: 139 - protein, 3451 aa, Artificial Sequence
  Ile-MalOH-Ser
MVAKHSLENGVFHKMTENEKELILHFNNTKTDYPKNKTLHELFEEQAMKTPDHTALVFGAQRMTYRELNEKANQTARLLREKGIGRGSIAAIIADRSFEMIIGIIGILKAGGAYLPIDPETPKDRIAFMLSDTKAAVLLTQGKAADGIDCEADIVQLDREASDGFSKEPLSSVNDSGDTAYIIYTSGSTGTPKGVITPHYSVIRVVQNTNYIDITEDNVILQLSNYSFDGSVFDIFGALLNGASLVMIEKEALLNINRLGSAINEEKVSVMFITTALFNMIADIHVDCLSNLRKILFGGERASIPHVRKVLNHVGRDKLIHVYGPTESTVYATYYFINEIDDEAETIPIGSPLANTSVLIMDEAGKLVPIGVPGELCIAGDGLSKGYLNREELTAEKFIPHPFIPGERLYKTGDLAKWLPDGNIEFIGRIDHQVKIRGFRIELGEIESRLEMHEDINETIVTVREDEESRPYICAYITANREISLDELKGFLGEKLPEYMIPAYFVKLDKLPLTKNGKVDRKALPEPDRTAGAENEYEAPRNETEEKLAAVWQDVLHVEKAGIHDHFAQMGGHSLHAMELIAKIKEKMNVEIPLHQLFKLATIKELSAFIEANGLPQEIKHTPAVRTTSEDPIAIVSMACRLPGGVNTPQRLWELLREGGETLSGFPTDRGWDLARLHHPDPDNPGTSYVDKGGFLDDAAGFDAEFFGVSPREAAAMDPQQRLLLETSWELVENAGIDPHSLRGTATGVFLGVAKFGYGEDTAAAEDVEGYSVTGVAPAVASGRISYTMGLEGPSISVDTACSSSLVALHLAVESLRKGESSMAVVGGAAVMATPGVFVDFSRQRALAADGRSKAFGAGADGFGFSEGVTLVLLERLSEARRNGHEVLAVVRGSALNQDGASNGLSAPSGPAQRRVIRQALESCGLEPGDVDAVEAHGTGTALGDPIEANALLDTYGRDRDADRPLWLGSVKSNIGHTQAAAGVTGLLKVVLALRNGELPATLHVEEPTPHVDWSSGGVALLAGNQPWRRGERTRRAAVSAFGISGTNAHVIVEEAPQEVRPAPGQGLSPAVSTLVVAGKTMQRVSATAGMLADWMEGPGADVALADVAHTLNHHRSRQPKFGTVVARDRTQAIAGLRALAAGQHAPGVVNPAEGSPGPGTVFVFPGQGSQRAGMGEELAAAFPVFARIHQQVWDLLDVPDLDVNETGYAQPALFALQVALFGLLESWGVRPDAVVGHSVGELAAGYVSGLWSLEDACTLVSARARLMQALPAGGVMAAVPVSEDEARAVLGEGVEIAAVNGPSSVVLSGDEAAVLQAAEGLGKWTRLPTSHAFHSARMEPMLEEFRAVAEGLTYRTPQVAMAAGDQVMTAEYWVRQVRDTVRFGEQVASFEDAVFVELGADRSLARLVDGIAMLHGDHEAQAADHRQITEAVADAYVLGHLPDFAALRRPHARKLDLPTYPFERRQYWFRDARERPEQPRDTGGPRTEAVRLLEDGRIEELAALLGGASDDQHTLQVLTKLAAQHNQQRTTRSIADDRYEIRWDRSTSPLSGADVDQAGSWIVVSDDADAVPPLVDLLAARNEPHQVVGLPASDADEERLAETLRAAATEDATLRIVHVAALEAGATPSMRSLLRMQHRILGGTRRVFRAAVAAELRGPIWIVTRGAQRVADTDTVAPHQSCLWGFGRAASLELPHVWGGLADLSEGGDNAADEWSALVDRIAAPHGSAVREDQLALRDRAVYTPRLARRSAPPSGTPLHLRGDGTVLITGGTGTLGRLLARHLVTEHGVRHLLLVSRRGADAPGSDELRAEIEDLGASAEIAACDTADRDALSALLDGLPRPLTGVVHAAGVLADGLVTSIDEPAVEQVLRAKVDAAWNLHELTANTGLSFFVLFSSAASVLAGPGQGVYAAANESLNALAALRRTRGLPAKALGWGLWAIGRAIAFAEQTGDAIAPEEGAYAFETLLRHNRAYSGYAPVIGSPWLTAFAQHSPFAEKFQSLGQNRSGTSKFLAELVDLPREEWPDRLRRLLELVRSHAAAVSGYGSADQLPERKAFKDLGFDSLAAVELRNRLGTATGVRLPSTLVFDHPTPLAVAEHLRDRLLASARAPRDVRQTAHADAAEPAGDDGLQHLPLVAAQPGIWMAEKLSELPSAWSVAHYVELTGEVDSPLLARAVVAGLAQADTLRMRFTEDNGEVWQWVDDALTFELPEIIDLRTNIDPHGTAQALMQADLQQDLRVDSGKPLVFHQLIQVADNRWYWYQRYHHLLVDGFSFPAITRQIANIYCTWLRGEPTPASPFTPFADVVEEYQQYRESEAWQRDAAFWAEQRRQLPPPASLSPAPLPGRSASADILRLKLEFTDGEFRQLATQLSGVQRTDLALALAALWLGRLCNRMDYAAGFIFMRRLGSAALTATGPVLNVLPLGIHIGNPSFSELLTRVREVALGAYAHQHIPFEMLVEALQPERNLSHTPLFQVMFVLQNAPASQLELTGITANPIKVKSTTTKFDLTLIMQNTASGLVGVWEYNTDLFDASTIERMTGHFVTLLEGVIANPQQPISQLPILTTVEQQQLLVEWNNTQTDYPADKCIHQLFEEQVERTPDAVAVVFGNQQLSYREMREQVVALANLLRERGVKPGDSVAVALPRSVFLTLALHAIVEAGAAWLPLDTGYPDDRLKMMLEDARPSLLITTDDQLPRFSDVPNLTSLCYNAPLTPQGSAPLQLSQPHHTAYIIFTSGSTGRPKGVMVGQTAIVNRLLWMQNHYPLTGEDVVAQKTPCSFDVSVWEFFWPFIAGAKLVMAEPEAHRDPLAMQQFFAEYGVTTTHFVPSMLAAFVASLTPQTARQSCATLKQVFCSGEALPADLCREWQQLTGAPLHNLYGPTEAAVDVSWYPAFGEELAQVRGSSVPIGYPVWNTGLRILDAMMHPVPPGVAGDLYLTGIQLAQGYLGRPDLTASRFIADPFAPGERMYRTGDVARWLDNGAVEYLGRSDDQLKIRGQRIELGEIDRVMQALPDVEQAVASCAIAREDIPGNKHLVAYIVPQEEQTCTERSRSTLTVSFVRSFLKEKLPEYMVPSAIVILDALPLTPNGKLDRRALPAPDLHSQLETIIAAAFSSLLGCDVQDADADFFALGGHSLLAMKLAAQLSRQVARQVTPGQVMVASTVAKLATIIDAELDKYVAPRNPITSGEDNPIPLCQGDGEEMSTWLRRFGPPVEHRARLVCFPHAGAAADSYLDLARALAPEIDVHAVQYPGRQDRRDEEPLGTAGEIADEVAAVLRASGGDGPFALFGHSMGALIAYETARRLEREPGGGPLRLFVSGQTAPRVHERRTDLPGDDGLVDELRRLGTSEAALADEALLAMSLPVLRADYRVLRSYAWADGPPLRAGITALCGDADPLTATGDAERWLQHSVIPGRTRTFPGGHFYLGEQVTEVAGAVRRDLLRAGLAG

SEQ ID NO: 140 - DNA, 12009 bp, Artificial Sequence
  Ile-MalH-Ser
atggttgccaaacatagtctggaaaacggtgtctttcacaagatgactgaaaacgagaaggaattgatccttcatttcaacaacactaagacagattaccctaagaacaagacgttgcatgaactttttgaagagcaggcaatgaaaaccccggatcacacagcactggtgttcggcgctcagagaatgacctacagggaactgaacgagaaggcgaatcaaacggcccgtctgttacgcgaaaaagggatcggacgtggcagcattgcggccattatcgcagatcgctcttttgaaatgatcatcggaatcatcggcatcctaaaggcaggcggtgcttatctgccgattgacccagaaaccccgaaagatcgtatcgcgttcatgctgagcgataccaaggcagctgtattgcttacgcagggaaaagcggccgatggcattgactgcgaagcggatatcgtgcaactggaccgtgaagccagcgatggtttttctaaagagccgctgagctctgttaatgatagtggcgacaccgcgtatattatctacacgagtggttccaccgggaccccgaaaggtgtgattaccccgcattattccgttatccgcgtggttcagaacactaactacatcgatatcacagaagacaacgtaatcctccaactatcaaactactcgttcgacggtagtgtgtttgatattttcggtgcgctcctaaacggggcctccctggtgatgatcgagaaagaagcactgttaaacattaatcgtctgggctcagctatcaatgaagagaaagtgagcgtgatgtttattaccacggcgctgttcaacatgattgccgatatccatgttgactgcctctcaaacctgcgtaaaattctgtttggcggcgaacgagcttcgatcccacatgtccgcaaggtactgaaccacgtcggtcgcgataaattaattcacgtatatggcccgactgaatcaacagtgtacgccacctattacttcataaacgaaattgatgacgaggcggaaactatccccataggtagcccgctggccaataccagcgtgctgattatggacgaagcaggcaaactggtcccaattggagtacctggcgaactgtgtatcgctggtgatgggttgtctaaaggttatcttaaccgtgaagagctcaccgcggaaaaatttatcccgcatccattcattcccggtgaacgtctgtacaagacgggcgaccttgccaaatggctcccagatggaaatatcgaatttataggccgcattgatcatcaggttaaaatccgtggctttcgaattgaactgggggagatcgaaagccgtttagaaatgcacgaggacatcaacgaaaccattgtgacggttcgcgaggatgaagagagccggccgtatatctgtgcatacattaccgctaatcgtgaaatttctcttgatgagctcaagggttttctgggggaaaaattacccgagtatatgatcccggcgtacttcgttaagctggataaactgccgttaacgaagaatggtaaagtcgaccggaaagccctgcctgaacccgatcgtactgcgggcgccgagaacgaatatgaggcaccgcgcaatgaaacagaagagaaactggcagctgtctggcaggacgtgttacatgttgaaaaagcaggcattcatgatcactttgctcaaatgggcggtcattcattgcacgcaatggaacttatcgctaagatcaaggaaaagatgaacgttgagatcccgctgcaccagttatttaagttggcgaccattaaagaactgtcggcgttcatcgaggccaatggcctaccccaggaaattaaacacacgccggcggttcggaccacatccgaagatccaattgccatagtatccatggcttgccggttacccggtggtgtgaataccccacagagactatgggaattattacgtgaagggggagaaaccctcagtggcttccctaccgaccgagggtgggacctcgcgaggttgcatcacccagacccagacaaccccggtacgtcatacgttgataaagggggattcctggacgatgcggcagggtttgacgcagaatttttcggtgtgagccccagagaagcagcggctatggacccgcagcagagattactcctcgaaaccagctgggagttagtcgagaatgcagggattgatccacatagcctaagggggaccgccactggtgtcttcctcggcgttgccaagtttgggtatggcgaggatacggcagctgccgaagacgtcgaggggtactctgtcactggtgtagccccggcagtggcgtcgggcagaattagttacacgatggggttggaagggccgtctatttcggttgataccgcctgttcctccagtctggttgcactccaccttgcagtcgagtcgctccggaaaggagaaagcagtatggccgtggtcgggggagcggcggtgatggccacaccgggtgtgtttgtggatttttcccgacagagagccttggccgcggatgggcgttcaaaggcgttcggagcaggtgcagacgggtttggatttagcgaaggtgtgacactggttctcctagaaagattaagtgaagcccggcgtaacggccatgaggtgctggcagttgttagaggttccgcattaaaccaggacggggcttcgaacgggctgagcgccccctcgggcccggcacagagaagagtgatacgccaagcactcgaatcgtgtggcctagaaccaggtgacgttgacgcggtggaagcgcacgggacaggaactgcgttaggggacccgatagaagcaaacgccttgctggacacttatggtagagatcgtgatgcggatcgacccctctggttaggaagtgttaagtcaaatataggacacactcaggcagcggcgggagtaactgggctgctcaaagtagtcctagccttacgcaatggggaactacccgccaccctacatgtcgaggaaccgacaccgcatgtggattggtcgagcgggggagttgctctcttggcgggtaatcagccgtggcgaagaggtgaacgaacccgtagagccgccgtgtccgcattcgggatcagtggtacgaacgcgcacgtgattgtggaagaagctccacaagaggtgagaccagcgcccggtcaaggactctcgcccgcggtgtcaaccttggtagtggcgggtaaaactatgcagcgtgtttcggcaaccgccggtatgctcgcagattggatggaaggcccaggtgcagatgtggcgctggcggacgtggcgcacacgttaaatcatcaccgttcacggcaaccaaagttcggtacggtggtggccagggaccggacacaggcaatcgccggactaagagcgctggcggcgggtcagcacgccccaggggttgttaaccctgctgaaggaagtccaggtccagggacggtgttcgtgtttcctggccaggggtcccagcgtgcaggcatgggggaggagttggctgcggctttccccgtgtttgccagaatccaccagcaagtgtgggatttactcgatgttcctgatctcgacgttaacgaaacggggtacgcacaaccagcactcttcgcactccaagtggcgctgtttgggctcctcgaatcatggggagtacggccggatgccgtggtcgggcatagtgtaggggaattagcggcagggtacgtttccgggctttggagtcttgaggatgcttgcacgctcgtgtcggcgagagcccgtctaatgcaagccttaccggcaggtggtgttatggcggcagttccagtgtccgaagacgaagcacgggctgtgttgggggaaggagtcgaaatagctgcggtcaacggtccgtcgagcgtggttctaagcggtgatgaagcagcagtgctccaggccgcggaagggttaggcaagtggacgcgattaccgacctcgcatgcattccattctgctcgtatggaaccaatgctggaagagtttagagcagtggcggaaggtctaacatacaggactccccaggtggcaatggccgccggagaccaggttatgaccgctgaatactgggtgcgtcaggttagggatacagttcgttttggcgagcaagttgcctcgttcgaggatgctgtattcgtggaattgggagcagatcgctctcttgcacggctagtcgatggtatcgcgatgttgcacggggatcatgaggcacaggctggtatgcggagagaacaacccttgcccttaggtttacgaagattgctaaccgacctgcataacgctggtgctgccgtcgattttagtgttttgtgcccacaaggtcgtctggttgacgcaccgttaccagcctggtcacaccggtttctcttctatgaccgggaaggagtggacaatagatcaccagggggaagcacagtggcggtccacccgcttttactagccgcggtggatgtgccgggccacggtggagcggttttcacgggtagactctcgactgacgagcaaccgtggttagcggagcacgttgtcgggggaagaaccctagttcctggttctgttttagtcgatctagccttagcggcaggcgaagacgtagggctaccggtgttagaagaattagtattgcagaggccgctggtgcttgccggcgcgggagcactcctacggatgtcggtcggggcaccagacgagagcggtagaagaactatcgatgttcacgcagctgaagacgtcgccgatttagcagatgcccaatggtcccagcacgccaccgggactttagcccaaggggtagcggcggggcccagggacacagagcaatggcccccagaggatgccgtccggattccattagacgaccattatgatggtctcgcggaacagggttatgagtacggtccgtcgtttcaggcgctagtggcctacgtggcggaggatgcgactgcgacaatgttagcggaagtcgcgcttccgggcagcattagatcgcaacaaggtctatacgccatccatcccgcactgctggacgcttgttttcaatctgtcggagcccacccagacagtcaatccgtcgggtcaggtctactcgtacccctcggtgttcggagagttcgtgcgtacgcacccgtaaggaccgcccgttattgttacacccgcgtcacgaaagttgaactagctggggttgaggccgacatcgacgttctggatgctcacggcacagtgcttctagccgtgtgcggtcttcgtatcgggaccggagtgagcgagagggacaaacacaacagagttctcaatgagcgcctactcaccatcgaatggcatcagcgtgaactaccagaaatggacccctcgggtgccgggaagtggctcctaatctcggactgtgcagcatccgatgtcaccgctacacgactggctgatgccttccgggagcacagcgctgcgtgcactaccatgcggtggccacttcacgatgatcaactagcagccgccgaccaactccgggaccaggtgggttcagatgagttttctggcgtggtagtactaacagggccaaacacagggacccctcatcagggttccgcagaccgtggcgccgagtacgttaggcggttagttggaatcgctcgtgaacttagcgatcttcccggagcggttccccgtatgtatgtcgtcacaaggggagcgcagagagtccttgccgatgattgtgttaatttagaacagggagggctcagaggtctgctgaggaccatcggtgctgagcacccacatctccgcgccacccaaattgatgttgatgagcagacaggagtagagcagctggcgcgacaactcctagctacatcggaggaagacgagacagcctggagggacaacgaatggtacgttgcgaggttatgccccacacccctgaggccacaggaacgtaggacaatagtggcggaccatcaacagtctggtatgcggttacaaatacgtacgcccggtgcaatcgatagtgtggcctttgaacccgcacccgatgtagagcaacccttacgggcgggtgaagttcgggttgacgttagagcaaccggtgttaatttccgtgacgttctactcgctctcgggatgtatccccagaaagctgacatggggacagaagcagctggtgttgtaacagcagtgggacctgatgtcgatgcgtttgcgcctggtgatagagttctagggctattccaaggggcatttgctccaattgcggtgactgaccatcgtttactggcacgggtgccagacgggtggtcagatgccgatgcggcggcggtgccaatagcttacacgacagcacattatgcgctgcacgacctggcggggttgcgggcggggcaatctgtcctgatacacgcggcagcgggtggtgttggtatggccgctgttgcactggcacggagggccggcgcagaagttctggctaccgcaggacctgcaaaacacggtacgctacgggcattagggctagatgatgaacacatcgcttcgagtcgggagaccgggttcgcgcgtaagttccgagagcggactgggggacgaggagtggacgtcgttctaaacagcttgaccggcgaactattagacgagtccgcggatctcctcgcggaggacggagtcttcgtggaaatgggaaagactgatctgcgcgatgcaggggactttcgtgggcgctacgccccgtttgatctaggggaagcaggcgatgacaggctcggggaaattctacgtgaggtggtgggactgctcggtgcaggggaactcgaccgactccctgttagcgcgtgggaattggggataccccagacggggaagtcgttagtgacgctgccacccgaacaagcgcaagttttcagaccagacggcactgtattgatcaccgggggaacgggaacgttaggtcggctgctggcccgtcatctggttacagagcacggggtgcgtcacctgctgctagtgtcgaggagaggagcagatgcccctggatcggacgagctgagggccgaaatcgaggatctcggagcatcagcggaaattgcagcatgtgatacagccgatcgagacgctctcagcgcgttgctagatggactgccgaggccactgaccggagtagttcacgccgcgggagtcctcgctgacggtctggttacatccatcgacgagcccgcagtcgaacaagttctccgtgcaaaagttgatgcggcctggaacctgcacgagctaactgcgaacaccggtctcagctttttcgtgctgttctcgtcagccgcaagtgtgttagcggggccggggcagggagtatatgcggcagcgaacgaatctttaaacgctctggccgctctgcgtaggactaggggtttacccgcaaaagcattgggatggggattatgggcgatagggcgtgcaatagcatttgccgagcagaccggtgacgcaatcgccccggaggaaggcgcgtacgccttcgagacactactcagacataacagggcgtactcgggttacgctcccgtgatagggtcaccatggctgactgcgttcgcccaacattcgccctttgcggagaagttccagtccctggggcaaaatagatccgggacgtctaagtttctggcagaattagtcgatctgccaagagaagaatggccagatcggttacgtcgtctattagaactggtgaggtctcatgctgccgcagtttcggggtatggatcggcagaccaattaccagaaagaaaagcattcaaagacctcggattcgattcactggcagcagtcgaactaagaaatcgtctagggaccgcgacaggcgtccggctgcccagtactctggtgttcgaccacccaaccccacttgcggttgcggaacatctacgtgatcgtctattggcttccgctcgtgctccgcgtgacgtccgccaaacagctcacgctgacgctgctgaaccggctggcgacgacggccttcagcacttgcccttagtagctgcgcaacctggaatatggatggccgagaagttatctgaactaccatcagcgtggagcgtagcgcattacgtggagctcactggtgaggttgactcgcctcttttggccagggcggtagtggctggccttgcacaagctgacaccttaagaatgcgtttcacagaggataatggggaagtttggcaatgggtagacgatgcgttaacatttgagttaccggaaatcatagacctgcgcactaacatagaccctcacgggacagctcaggccttgatgcaagcggacctgcaacaggacctacgtgtggattcggggaagcctctggtcttccatcagctaattcaagtagcggacaatcgctggtactggtatcaaaggtaccaccacttgcttgtggacgggttcagttttccagcgataaccaggcaaatagccaacatttattgcacttggttgcgaggagagcctacgcccgcatcccccttcacgccattcgcagacgttgttgaggaataccaacagtatcgcgagagcgaagcgtggcaacgcgatgcggcattctgggcggagcaacgacggcaactaccgcctcccgcatccctatcacctgccccgctccccggccggtccgcgtcagccgacattctacggctaaagctggagttcacagatggtgaatttcgacagcttgctacacaactcagcggggtacaaaggacagacctagcgctcgctctggctgcattatggctaggacgactttgcaatcgaatggactacgcggcgggtttcatatttatgcgccggctcggcagcgcagcgttgaccgcaacgggtccagttttaaatgttcttcctttgggaatccacataggcaacccaagcttctctgagcttctcaccagggttcgcgaggtcgccttaggcgcgtatgcacaccaacatattccttttgagatgttagtagaggcactgcaaccagagcgaaaccttagccatactcctctcttccaagtgatgtttgtccttcagaatgcgcccgcgtcccaattagagttaaccgggatcaccgcaaacccaattaaggttaaatcaactaccacgaagttcgacctaactttaatcatgcaaaacacagctagcggattagtaggtgtttgggagtacaacacggatttattcgacgcgtcaacgattgagcgaatgacagggcactttgtaaccctcctcgagggcgttatcgccaatccacaacagccgatctctcaacttcctattttaactacagtggagcaacagcaacttttagtcgagtggaataacacgcaaaccgactaccccgctgataagtgtatacatcaattattcgaggaacaggtcgagcgcacaccagacgccgttgctgtcgtctttgggaatcagcaactcagctatcgagagatgcgcgaacaagtggttgcactcgccaatttattacgtgagcggggagtcaagccaggagactccgttgccgtggccttaccacgctctgttttcttaacccttgcactacacgcgattgtcgaggcaggtgccgcctggctacctcttgacacaggatatcctgacgatagattaaaaatgatgctcgaggatgcacggccttcccttctgatcacaacagacgatcaattaccccgcttcagtgacgtacctaatctgacctcactctgttacaacgctcccttgacgcctcaagggagcgcccctttacagctgtctcaacctcaccatactgcatatatcatctttacaagtggttctacgggacgccccaagggagtaatggttggtcagactgcgattgtaaatcgtctgttgtggatgcaaaaccactaccctttgacgggggaggacgttgtagcccaaaagactccttgctcgttcgatgtctcagtctgggagttcttttggccatttatagcaggggccaaattagttatggcggagccggaagcccaccgagacccacttgcgatgcagcaattctttgctgagtatggtgtcaccactacacatttcgtcccatcgatgttagcggccttcgtggcttctcttactccacaaacggctaggcaatcttgtgccacactaaagcaagtcttctgctccggcgaggcattacctgcagacttgtgccgggaatggcagcaactcacaggagctccattgcacaatctatacggaccgaccgaggccgcagtagacgtatcttggtatcctgcgtttggcgaggagttagcgcaagtaagaggttcgtcagtaccaataggataccccgtatggaacacggggcttcggatactggacgcgatgatgcatccggtcccaccaggagtcgcgggcgatttatacctgactgggatacagctggcccaaggttacctagggagacctgaccttacggcgtcgaggttcatagcggatccgtttgctccgggtgagcgcatgtaccgtacgggcgacgtcgcgcgatggctagataatggcgccgtagagtatcttggtagatcagacgatcagttaaagatacggggacaacgaatagagcttggggaaatagaccgggtaatgcaggctttgccagatgtcgagcaagcggtggcttcgtgtgctattgcgcgggaggacatacctgggaacaaacaccttgtagcgtacatagttcctcaagaggagcaaacatgcactgagcgatcgaggtccacacttacagtttcgttcgtccggagtttccttaaggagaaactccccgaatatatggtaccgagcgcaatagtgattctagacgctctccccctgactcctaatggaaagctagaccggcgggcgttacccgcccctgacctgcactcacaacttgagacaattattgctgcggctttctcgagcctgctcgggtgcgacgtacaagacgcggatgctgactttttcgcgctaggtggccattcgctgcttgccatgaagctagccgctcagctttcccgacaagtagcgcggcaggtgacaccaggccaagttatggtagcttcgactgtcgcaaagctcgcaacgatcatagacgcggagttagataaatacgtcgctccaaggaacccgataacatccggggaagataaccctatccccctatgtcaaggcgatggggaggagatgagcacatggctacgtcgttttggacccccagtcgaacatcgggccaggctagtgtgtttcccccacgcaggcgcagcggcggattcatacttagacctagcaagagcgttagcaccagagatcgatgttcatgctgttcaataccccggcaggcaagacagaagggacgaggagccattaggaaccgcaggtgaaattgcagatgaagtggcagcggtgctacgtgcgtcgggaggggatgggccttttgcacttttcggccacagtatgggcgccctcatcgcgtacgagacagcaaggcgattagagagggaaccgggagggggacccttacgtttattcgtgagcggacaaacagcgccacgtgtccatgaacgaagaactgatctgcccggtgacgatggactcgtggacgagcttaggcgacttggcacctccgaggcagcgctcgcagacgaagccctgctggctatgtctctcccggtgctcagggcggattatagggtgttaagatcctacgcttgggcggatggtcccccactacgcgccggtataactgccctctgcggtgatgcagacccactaactgcaacaggggatgcggaacgctggttacaacattccgtgattccgggtcggacacggacatttcccggtgggcatttttatttaggggaacaagtgaccgaggtggcaggggctgtccgtagagatttactgagagcagggttagcgggttga

SEQ ID NO: 141 - protein, 4002 aa, Artificial Sequence
  Ile-MalH-Ser
MVAKHSLENGVFHKMTENEKELILHFNNTKTDYPKNKTLHELFEEQAMKTPDHTALVFGAQRMTYRELNEKANQTARLLREKGIGRGSIAAIIADRSFEMIIGIIGILKAGGAYLPIDPETPKDRIAFMLSDTKAAVLLTQGKAADGIDCEADIVQLDREASDGFSKEPLSSVNDSGDTAYIIYTSGSTGTPKGVITPHYSVIRVVQNTNYIDITEDNVILQLSNYSFDGSVFDIFGALLNGASLVMIEKEALLNINRLGSAINEEKVSVMFITTALFNMIADIHVDCLSNLRKILFGGERASIPHVRKVLNHVGRDKLIHVYGPTESTVYATYYFINEIDDEAETIPIGSPLANTSVLIMDEAGKLVPIGVPGELCIAGDGLSKGYLNREELTAEKFIPHPFIPGERLYKTGDLAKWLPDGNIEFIGRIDHQVKIRGFRIELGEIESRLEMHEDINETIVTVREDEESRPYICAYITANREISLDELKGFLGEKLPEYMIPAYFVKLDKLPLTKNGKVDRKALPEPDRTAGAENEYEAPRNETEEKLAAVWQDVLHVEKAGIHDHFAQMGGHSLHAMELIAKIKEKMNVEIPLHQLFKLATIKELSAFIEANGLPQEIKHTPAVRTTSEDPIAIVSMACRLPGGVNTPQRLWELLREGGETLSGFPTDRGWDLARLHHPDPDNPGTSYVDKGGFLDDAAGFDAEFFGVSPREAAAMDPQQRLLLETSWELVENAGIDPHSLRGTATGVFLGVAKFGYGEDTAAAEDVEGYSVTGVAPAVASGRISYTMGLEGPSISVDTACSSSLVALHLAVESLRKGESSMAVVGGAAVMATPGVFVDFSRQRALAADGRSKAFGAGADGFGFSEGVTLVLLERLSEARRNGHEVLAVVRGSALNQDGASNGLSAPSGPAQRRVIRQALESCGLEPGDVDAVEAHGTGTALGDPIEANALLDTYGRDRDADRPLWLGSVKSNIGHTQAAAGVTGLLKVVLALRNGELPATLHVEEPTPHVDWSSGGVALLAGNQPWRRGERTRRAAVSAFGISGTNAHVIVEEAPQEVRPAPGQGLSPAVSTLVVAGKTMQRVSATAGMLADWMEGPGADVALADVAHTLNHHRSRQPKFGTVVARDRTQAIAGLRALAAGQHAPGVVNPAEGSPGPGTVFVFPGQGSQRAGMGEELAAAFPVFARIHQQVWDLLDVPDLDVNETGYAQPALFALQVALFGLLESWGVRPDAVVGHSVGELAAGYVSGLWSLEDACTLVSARARLMQALPAGGVMAAVPVSEDEARAVLGEGVEIAAVNGPSSVVLSGDEAAVLQAAEGLGKWTRLPTSHAFHSARMEPMLEEFRAVAEGLTYRTPQVAMAAGDQVMTAEYWVRQVRDTVRFGEQVASFEDAVFVELGADRSLARLVDGIAMLHGDHEAQAGMRREQPLPLGLRRLLTDLHNAGAAVDFSVLCPQGRLVDAPLPAWSHRFLFYDREGVDNRSPGGSTVAVHPLLLAAVDVPGHGGAVFTGRLSTDEQPWLAEHVVGGRTLVPGSVLVDLALAAGEDVGLPVLEELVLQRPLVLAGAGALLRMSVGAPDESGRRTIDVHAAEDVADLADAQWSQHATGTLAQGVAAGPRDTEQWPPEDAVRIPLDDHYDGLAEQGYEYGPSFQALVAYVAEDATATMLAEVALPGSIRSQQGLYAIHPALLDACFQSVGAHPDSQSVGSGLLVPLGVRRVRAYAPVRTARYCYTRVTKVELAGVEADIDVLDAHGTVLLAVCGLRIGTGVSERDKHNRVLNERLLTIEWHQRELPEMDPSGAGKWLLISDCAASDVTATRLADAFREHSAACTTMRWPLHDDQLAAADQLRDQVGSDEFSGVVVLTGPNTGTPHQGSADRGAEYVRRLVGIARELSDLPGAVPRMYVVTRGAQRVLADDCVNLEQGGLRGLLRTIGAEHPHLRATQIDVDEQTGVEQLARQLLATSEEDETAWRDNEWYVARLCPTPLRPQERRTIVADHQQSGMRLQIRTPGAIDSVAFEPAPDVEQPLRAGEVRVDVRATGVNFRDVLLALGMYPQKADMGTEAAGVVTAVGPDVDAFAPGDRVLGLFQGAFAPIAVTDHRLLARVPDGWSDADAAAVPIAYTTAHYALHDLAGLRAGQSVLIHAAAGGVGMAAVALARRAGAEVLATAGPAKHGTLRALGLDDEHIASSRETGFARKFRERTGGRGVDVVLNSLTGELLDESADLLAEDGVFVEMGKTDLRDAGDFRGRYAPFDLGEAGDDRLGEILREVVGLLGAGELDRLPVSAWELGIPQTGKSLVTLPPEQAQVFRPDGTVLITGGTGTLGRLLARHLVTEHGVRHLLLVSRRGADAPGSDELRAEIEDLGASAEIAACDTADRDALSALLDGLPRPLTGVVHAAGVLADGLVTSIDEPAVEQVLRAKVDAAWNLHELTANTGLSFFVLFSSAASVLAGPGQGVYAAANESLNALAALRRTRGLPAKALGWGLWAIGRAIAFAEQTGDAIAPEEGAYAFETLLRHNRAYSGYAPVIGSPWLTAFAQHSPFAEKFQSLGQNRSGTSKFLAELVDLPREEWPDRLRRLLELVRSHAAAVSGYGSADQLPERKAFKDLGFDSLAAVELRNRLGTATGVRLPSTLVFDHPTPLAVAEHLRDRLLASARAPRDVRQTAHADAAEPAGDDGLQHLPLVAAQPGIWMAEKLSELPSAWSVAHYVELTGEVDSPLLARAVVAGLAQADTLRMRFTEDNGEVWQWVDDALTFELPEIIDLRTNIDPHGTAQALMQADLQQDLRVDSGKPLVFHQLIQVADNRWYWYQRYHHLLVDGFSFPAITRQIANIYCTWLRGEPTPASPFTPFADVVEEYQQYRESEAWQRDAAFWAEQRRQLPPPASLSPAPLPGRSASADILRLKLEFTDGEFRQLATQLSGVQRTDLALALAALWLGRLCNRMDYAAGFIFMRRLGSAALTATGPVLNVLPLGIHIGNPSFSELLTRVREVALGAYAHQHIPFEMLVEALQPERNLSHTPLFQVMFVLQNAPASQLELTGITANPIKVKSTTTKFDLTLIMQNTASGLVGVWEYNTDLFDASTIERMTGHFVTLLEGVIANPQQPISQLPILTTVEQQQLLVEWNNTQTDYPADKCIHQLFEEQVERTPDAVAVVFGNQQLSYREMREQVVALANLLRERGVKPGDSVAVALPRSVFLTLALHAIVEAGAAWLPLDTGYPDDRLKMMLEDARPSLLITTDDQLPRFSDVPNLTSLCYNAPLTPQGSAPLQLSQPHHTAYIIFTSGSTGRPKGVMVGQTAIVNRLLWMQNHYPLTGEDVVAQKTPCSFDVSVWEFFWPFIAGAKLVMAEPEAHRDPLAMQQFFAEYGVTTTHFVPSMLAAFVASLTPQTARQSCATLKQVFCSGEALPADLCREWQQLTGAPLHNLYGPTEAAVDVSWYPAFGEELAQVRGSSVPIGYPVWNTGLRILDAMMHPVPPGVAGDLYLTGIQLAQGYLGRPDLTASRFIADPFAPGERMYRTGDVARWLDNGAVEYLGRSDDQLKIRGQRIELGEIDRVMQALPDVEQAVASCAIAREDIPGNKHLVAYIVPQEEQTCTERSRSTLTVSFVRSFLKEKLPEYMVPSAIVILDALPLTPNGKLDRRALPAPDLHSQLETIIAAAFSSLLGCDVQDADADFFALGGHSLLAMKLAAQLSRQVARQVTPGQVMVASTVAKLATIIDAELDKYVAPRNPITSGEDNPIPLCQGDGEEMSTWLRRFGPPVEHRARLVCFPHAGAAADSYLDLARALAPEIDVHAVQYPGRQDRRDEEPLGTAGEIADEVAAVLRASGGDGPFALFGHSMGALIAYETARRLEREPGGGPLRLFVSGQTAPRVHERRTDLPGDDGLVDELRRLGTSEAALADEALLAMSLPVLRADYRVLRSYAWADGPPLRAGITALCGDADPLTATGDAERWLQHSVIPGRTRTFPGGHFYLGEQVTEVAGAVRRDLLRAGLAG

SEQ ID NO: 142 - DNA, 9099 bp, Artificial Sequence
  Ile-Ser-Ser
atggttgccaaacatagtctggaaaacggtgtctttcacaagatgactgaaaacgagaaggaattgatccttcatttcaacaacactaagacagattaccctaagaacaagacgttgcatgaactttttgaagagcaggcaatgaaaaccccggatcacacagcactggtgttcggcgctcagagaatgacctacagggaactgaacgagaaggcgaatcaaacggcccgtctgttacgcgaaaaagggatcggacgtggcagcattgcggccattatcgcagatcgctcttttgaaatgatcatcggaatcatcggcatcctaaaggcaggcggtgcttatctgccgattgacccagaaaccccgaaagatcgtatcgcgttcatgctgagcgataccaaggcagctgtattgcttacgcagggaaaagcggccgatggcattgactgcgaagcggatatcgtgcaactggaccgtgaagccagcgatggtttttctaaagagccgctgagctctgttaatgatagtggcgacaccgcgtatattatctacacgagtggttccaccgggaccccgaaaggtgtgattaccccgcattattccgttatccgcgtggttcagaacactaactacatcgatatcacagaagacaacgtaatcctccaactatcaaactactcgttcgacggtagtgtgtttgatattttcggtgcgctcctaaacggggcctccctggtgatgatcgagaaagaagcactgttaaacattaatcgtctgggctcagctatcaatgaagagaaagtgagcgtgatgtttattaccacggcgctgttcaacatgattgccgatatccatgttgactgcctctcaaacctgcgtaaaattctgtttggcggcgaacgagcttcgatcccacatgtccgcaaggtactgaaccacgtcggtcgcgataaattaattcacgtatatggcccgactgaatcaacagtgtacgccacctattacttcataaacgaaattgatgacgaggcggaaactatccccataggtagcccgctggccaataccagcgtgctgattatggacgaagcaggcaaactggtcccaattggagtacctggcgaactgtgtatcgctggtgatgggttgtctaaaggttatcttaaccgtgaagagctcaccgcggaaaaatttatcccgcatccattcattcccggtgaacgtctgtacaagacgggcgaccttgccaaatggctcccagatggaaatatcgaatttataggccgcattgatcatcaggttaaaatccgtggctttcgaattgaactgggggagatcgaaagccgtttagaaatgcacgaggacatcaacgaaaccattgtgacggttcgcgaggatgaagagagccggccgtatatctgtgcatacattaccgctaatcgtgaaatttctcttgatgagctcaagggttttctgggggaaaaattacccgagtatatgatcccggcgtacttcgttaagctggataaactgccgttaacgaagaatggtaaagtcgaccggaaagccctgcctgaacccgatcgtactgcgggcgccgagaacgaatatgaggcaccgcgcaatgaaacagaagagaaactggcagctgtctggcaggacgtgttacatgttgaaaaagcaggcattcatgatcactttgctcaaatgggcggtcattcattgcacgcaatggaacttatcgctaagatcaaggaaaagatgaacgttgagatcccgctgcaccagttatttaagttggcgaccattaaagaactgtcggcgttcatcgaggccaatgccattcagacaggcgcatcactgtcaattccggcaatccaatcgcgcagcaaccgtgaccagcacttgcccttagtagctgcgcaacctggaatatggatggccgagaagttatctgaactaccatcagcgtggagcgtagcgcattacgtggagctcactggtgaggttgactcgcctcttttggccagggcggtagtggctggccttgcacaagctgacaccttaagaatgcgtttcacagaggataatggggaagtttggcaatgggtagacgatgcgttaacatttgagttaccggaaatcatagacctgcgcactaacatagaccctcacgggacagctcaggccttgatgcaagcggacctgcaacaggacctacgtgtggattcggggaagcctctggtcttccatcagctaattcaagtagcggacaatcgctggtactggtatcaaaggtaccaccacttgcttgtggacgggttcagttttccagcgataaccaggcaaatagccaacatttattgcacttggttgcgaggagagcctacgcccgcatcccccttcacgccattcgcagacgttgttgaggaataccaacagtatcgcgagagcgaagcgtggcaacgcgatgcggcattctgggcggagcaacgacggcaactaccgcctcccgcatccctatcacctgccccgctccccggccggtccgcgtcagccgacattctacggctaaagctggagttcacagatggtgaatttcgacagcttgctacacaactcagcggggtacaaaggacagacctagcgctcgctctggctgcattatggctaggacgactttgcaatcgaatggactacgcggcgggtttcatatttatgcgccggctcggcagcgcagcgttgaccgcaacgggtccagttttaaatgttcttcctttgggaatccacataggcaacccaagcttctctgagcttctcaccagggttcgcgaggtcgccttaggcgcgtatgcacaccaacatattccttttgagatgttagtagaggcactgcaaccagagcgaaaccttagccatactcctctcttccaagtgatgtttgtccttcagaatgcgcccgcgtcccaattagagttaaccgggatcaccgcaaacccaattaaggttaaatcaactaccacgaagttcgacctaactttaatcatgcaaaacacagctagcggattagtaggtgtttgggagtacaacacggatttattcgacgcgtcaacgattgagcgaatgacagggcactttgtaaccctcctcgagggcgttatcgccaatccacaacagccgatctctcaacttcctattttaactacagtggagcaacagcaacttttagtcgagtggaataacacgcaaaccgactaccccgctgataagtgtatacatcaattattcgaggaacaggtcgagcgcacaccagacgccgttgctgtcgtctttgggaatcagcaactcagctatcgagagatgcgcgaacaagtggttgcactcgccaatttattacgtgagcggggagtcaagccaggagactccgttgccgtggccttaccacgctctgttttcttaacccttgcactacacgcgattgtcgaggcaggtgccgcctggctacctcttgacacaggatatcctgacgatagattaaaaatgatgctcgaggatgcacggccttcccttctgatcacaacagacgatcaattaccccgcttcagtgacgtacctaatctgacctcactctgttacaacgctcccttgacgcctcaagggagcgcccctttacagctgtctcaacctcaccatactgcatatatcatctttacaagtggttctacgggacgccccaagggagtaatggttggtcagactgcgattgtaaatcgtctgttgtggatgcaaaaccactaccctttgacgggggaggacgttgtagcccaaaagactccttgctcgttcgatgtctcagtctgggagttcttttggccatttatagcaggggccaaattagttatggcggagccggaagcccaccgagacccacttgcgatgcagcaattctttgctgagtatggtgtcaccactacacatttcgtcccatcgatgttagcggccttcgtggcttctcttactccacaaacggctaggcaatcttgtgccacactaaagcaagtcttctgctccggcgaggcattacctgcagacttgtgccgggaatggcagcaactcacaggagctccattgcacaatctatacggaccgaccgaggccgcagtagacgtatcttggtatcctgcgtttggcgaggagttagcgcaagtaagaggttcgtcagtaccaataggataccccgtatggaacacggggcttcggatactggacgcgatgatgcatccggtcccaccaggagtcgcgggcgatttatacctgactgggatacagctggcccaaggttacctagggagacctgaccttacggcgtcgaggttcatagcggatccgtttgctccgggtgagcgcatgtaccgtacgggcgacgtcgcgcgatggctagataatggcgccgtagagtatcttggtagatcagacgatcagttaaagatacggggacaacgaatagagcttggggaaatagaccgggtaatgcaggctttgccagatgtcgagcaagcggtggcttcgtgtgctattgcgcgggaggacatacctgggaacaaacaccttgtagcgtacatagttcctcaagaggagcaaacatgcactgagcgatcgaggtccacacttacagtttcgttcgtccggagtttccttaaggagaaactccccgaatatatggtaccgagcgcaatagtgattctagacgctctccccctgactcctaatggaaagctagaccggcgggcgttacccgcccctgacctgcactcacaacttgagacaattattgctgcggctttctcgagcctgctcgggtgcgacgtacaagacgcggatgctgactttttcgcgctaggtggccattcgctgcttgccatgaagctagccgctcagctttcccgacaagtagcgcggcaggtgacaccaggccaagttatggtagcttcgactgtcgcaaagctcgcaacgatcatagacgcggagttagataaatacgtcgctccaaggaacccgatattggcttccgctcgtgctccgcgtgacgtccgccaaacagctcacgctgacgctgctgaaccggctggcgacgacggccttcagcacttgcccttagtagctgcgcaacctggaatatggatggccgagaagttatctgaactaccatcagcgtggagcgtagcgcattacgtggagctcactggtgaggttgactcgcctcttttggccagggcggtagtggctggccttgcacaagctgacaccttaagaatgcgtttcacagaggataatggggaagtttggcaatgggtagacgatgcgttaacatttgagttaccggaaatcatagacctgcgcactaacatagaccctcacgggacagctcaggccttgatgcaagcggacctgcaacaggacctacgtgtggattcggggaagcctctggtcttccatcagctaattcaagtagcggacaatcgctggtactggtatcaaaggtaccaccacttgcttgtggacgggttcagttttccagcgataaccaggcaaatagccaacatttattgcacttggttgcgaggagagcctacgcccgcatcccccttcacgccattcgcagacgttgttgaggaataccaacagtatcgcgagagcgaagcgtggcaacgcgatgcggcattctgggcggagcaacgacggcaactaccgcctcccgcatccctatcacctgccccgctccccggccggtccgcgtcagccgacattctacggctaaagctggagttcacagatggtgaatttcgacagcttgctacacaactcagcggggtacaaaggacagacctagcgctcgctctggctgcattatggctaggacgactttgcaatcgaatggactacgcggcgggtttcatatttatgcgccggctcggcagcgcagcgttgaccgcaacgggtccagttttaaatgttcttcctttgggaatccacataggcaacccaagcttctctgagcttctcaccagggttcgcgaggtcgccttaggcgcgtatgcacaccaacatattccttttgagatgttagtagaggcactgcaaccagagcgaaaccttagccatactcctctcttccaagtgatgtttgtccttcagaatgcgcccgcgtcccaattagagttaaccgggatcaccgcaaacccaattaaggttaaatcaactaccacgaagttcgacctaactttaatcatgcaaaacacagctagcggattagtaggtgtttgggagtacaacacggatttattcgacgcgtcaacgattgagcgaatgacagggcactttgtaaccctcctcgagggcgttatcgccaatccacaacagccgatctctcaacttcctattttaactacagtggagcaacagcaacttttagtcgagtggaataacacgcaaaccgactaccccgctgataagtgtatacatcaattattcgaggaacaggtcgagcgcacaccagacgccgttgctgtcgtctttgggaatcagcaactcagctatcgagagatgcgcgaacaagtggttgcactcgccaatttattacgtgagcggggagtcaagccaggagactccgttgccgtggccttaccacgctctgttttcttaacccttgcactacacgcgattgtcgaggcaggtgccgcctggctacctcttgacacaggatatcctgacgatagattaaaaatgatgctcgaggatgcacggccttcccttctgatcacaacagacgatcaattaccccgcttcagtgacgtacctaatctgacctcactctgttacaacgctcccttgacgcctcaagggagcgcccctttacagctgtctcaacctcaccatactgcatatatcatctttacaagtggttctacgggacgccccaagggagtaatggttggtcagactgcgattgtaaatcgtctgttgtggatgcaaaaccactaccctttgacgggggaggacgttgtagcccaaaagactccttgctcgttcgatgtctcagtctgggagttcttttggccatttatagcaggggccaaattagttatggcggagccggaagcccaccgagacccacttgcgatgcagcaattctttgctgagtatggtgtcaccactacacatttcgtcccatcgatgttagcggccttcgtggcttctcttactccacaaacggctaggcaatcttgtgccacactaaagcaagtcttctgctccggcgaggcattacctgcagacttgtgccgggaatggcagcaactcacaggagctccattgcacaatctatacggaccgaccgaggccgcagtagacgtatcttggtatcctgcgtttggcgaggagttagcgcaagtaagaggttcgtcagtaccaataggataccccgtatggaacacggggcttcggatactggacgcgatgatgcatccggtcccaccaggagtcgcgggcgatttatacctgactgggatacagctggcccaaggttacctagggagacctgaccttacggcgtcgaggttcatagcggatccgtttgctccgggtgagcgcatgtaccgtacgggcgacgtcgcgcgatggctagataatggcgccgtagagtatcttggtagatcagacgatcagttaaagatacggggacaacgaatagagcttggggaaatagaccgggtaatgcaggctttgccagatgtcgagcaagcggtggcttcgtgtgctattgcgcgggaggacatacctgggaacaaacaccttgtagcgtacatagttcctcaagaggagcaaacatgcactgagcgatcgaggtccacacttacagtttcgttcgtccggagtttccttaaggagaaactccccgaatatatggtaccgagcgcaatagtgattctagacgctctccccctgactcctaatggaaagctagaccggcgggcgttacccgcccctgacctgcactcacaacttgagacaattattgctgcggctttctcgagcctgctcgggtgcgacgtacaagacgcggatgctgactttttcgcgctaggtggccattcgctgcttgccatgaagctagccgctcagctttcccgacaagtagcgcggcaggtgacaccaggccaagttatggtagcttcgactgtcgcaaagctcgcaacgatcatagacgcggagttagataaatacgtcgctccaaggaacccgataacatccggggaagataaccctatccccctatgtcaaggcgatggggaggagatgagcacatggctacgtcgttttggacccccagtcgaacatcgggccaggctagtgtgtttcccccacgcaggcgcagcggcggattcatacttagacctagcaagagcgttagcaccagagatcgatgttcatgctgttcaataccccggcaggcaagacagaagggacgaggagccattaggaaccgcaggtgaaattgcagatgaagtggcagcggtgctacgtgcgtcgggaggggatgggccttttgcacttttcggccacagtatgggcgccctcatcgcgtacgagacagcaaggcgattagagagggaaccgggagggggacccttacgtttattcgtgagcggacaaacagcgccacgtgtccatgaacgaagaactgatctgcccggtgacgatggactcgtggacgagcttaggcgacttggcacctccgaggcagcgctcgcagacgaagccctgctggctatgtctctcccggtgctcagggcggattatagggtgttaagatcctacgcttgggcggatggtcccccactacgcgccggtataactgccctctgcggtgatgcagacccactaactgcaacaggggatgcggaacgctggttacaacattccgtgattccgggtcggacacggacatttcccggtgggcatttttatttaggggaacaagtgaccgaggtggcaggggctgtccgtagagatttactgagagcagggttagcgggttga

SEQ ID NO: 143 - protein, 3032 aa, Artificial Sequence
  Ile-Ser-Ser
MVAKHSLENGVFHKMTENEKELILHFNNTKTDYPKNKTLHELFEEQAMKTPDHTALVFGAQRMTYRELNEKANQTARLLREKGIGRGSIAAIIADRSFEMIIGIIGILKAGGAYLPIDPETPKDRIAFMLSDTKAAVLLTQGKAADGIDCEADIVQLDREASDGFSKEPLSSVNDSGDTAYIIYTSGSTGTPKGVITPHYSVIRVVQNTNYIDITEDNVILQLSNYSFDGSVFDIFGALLNGASLVMIEKEALLNINRLGSAINEEKVSVMFITTALFNMIADIHVDCLSNLRKILFGGERASIPHVRKVLNHVGRDKLIHVYGPTESTVYATYYFINEIDDEAETIPIGSPLANTSVLIMDEAGKLVPIGVPGELCIAGDGLSKGYLNREELTAEKFIPHPFIPGERLYKTGDLAKWLPDGNIEFIGRIDHQVKIRGFRIELGEIESRLEMHEDINETIVTVREDEESRPYICAYITANREISLDELKGFLGEKLPEYMIPAYFVKLDKLPLTKNGKVDRKALPEPDRTAGAENEYEAPRNETEEKLAAVWQDVLHVEKAGIHDHFAQMGGHSLHAMELIAKIKEKMNVEIPLHQLFKLATIKELSAFIEANAIQTGASLSIPAIQSRSNRDQHLPLVAAQPGIWMAEKLSELPSAWSVAHYVELTGEVDSPLLARAVVAGLAQADTLRMRFTEDNGEVWQWVDDALTFELPEIIDLRTNIDPHGTAQALMQADLQQDLRVDSGKPLVFHQLIQVADNRWYWYQRYHHLLVDGFSFPAITRQIANIYCTWLRGEPTPASPFTPFADVVEEYQQYRESEAWQRDAAFWAEQRRQLPPPASLSPAPLPGRSASADILRLKLEFTDGEFRQLATQLSGVQRTDLALALAALWLGRLCNRMDYAAGFIFMRRLGSAALTATGPVLNVLPLGIHIGNPSFSELLTRVREVALGAYAHQHIPFEMLVEALQPERNLSHTPLFQVMFVLQNAPASQLELTGITANPIKVKSTTTKFDLTLIMQNTASGLVGVWEYNTDLFDASTIERMTGHFVTLLEGVIANPQQPISQLPILTTVEQQQLLVEWNNTQTDYPADKCIHQLFEEQVERTPDAVAVVFGNQQLSYREMREQVVALANLLRERGVKPGDSVAVALPRSVFLTLALHAIVEAGAAWLPLDTGYPDDRLKMMLEDARPSLLITTDDQLPRFSDVPNLTSLCYNAPLTPQGSAPLQLSQPHHTAYIIFTSGSTGRPKGVMVGQTAIVNRLLWMQNHYPLTGEDVVAQKTPCSFDVSVWEFFWPFIAGAKLVMAEPEAHRDPLAMQQFFAEYGVTTTHFVPSMLAAFVASLTPQTARQSCATLKQVFCSGEALPADLCREWQQLTGAPLHNLYGPTEAAVDVSWYPAFGEELAQVRGSSVPIGYPVWNTGLRILDAMMHPVPPGVAGDLYLTGIQLAQGYLGRPDLTASRFIADPFAPGERMYRTGDVARWLDNGAVEYLGRSDDQLKIRGQRIELGEIDRVMQALPDVEQAVASCAIAREDIPGNKHLVAYIVPQEEQTCTERSRSTLTVSFVRSFLKEKLPEYMVPSAIVILDALPLTPNGKLDRRALPAPDLHSQLETIIAAAFSSLLGCDVQDADADFFALGGHSLLAMKLAAQLSRQVARQVTPGQVMVASTVAKLATIIDAELDKYVAPRNPILASARAPRDVRQTAHADAAEPAGDDGLQHLPLVAAQPGIWMAEKLSELPSAWSVAHYVELTGEVDSPLLARAVVAGLAQADTLRMRFTEDNGEVWQWVDDALTFELPEIIDLRTNIDPHGTAQALMQADLQQDLRVDSGKPLVFHQLIQVADNRWYWYQRYHHLLVDGFSFPAITRQIANIYCTWLRGEPTPASPFTPFADVVEEYQQYRESEAWQRDAAFWAEQRRQLPPPASLSPAPLPGRSASADILRLKLEFTDGEFRQLATQLSGVQRTDLALALAALWLGRLCNRMDYAAGFIFMRRLGSAALTATGPVLNVLPLGIHIGNPSFSELLTRVREVALGAYAHQHIPFEMLVEALQPERNLSHTPLFQVMFVLQNAPASQLELTGITANPIKVKSTTTKFDLTLIMQNTASGLVGVWEYNTDLFDASTIERMTGHFVTLLEGVIANPQQPISQLPILTTVEQQQLLVEWNNTQTDYPADKCIHQLFEEQVERTPDAVAVVFGNQQLSYREMREQVVALANLLRERGVKPGDSVAVALPRSVFLTLALHAIVEAGAAWLPLDTGYPDDRLKMMLEDARPSLLITTDDQLPRFSDVPNLTSLCYNAPLTPQGSAPLQLSQPHHTAYIIFTSGSTGRPKGVMVGQTAIVNRLLWMQNHYPLTGEDVVAQKTPCSFDVSVWEFFWPFIAGAKLVMAEPEAHRDPLAMQQFFAEYGVTTTHFVPSMLAAFVASLTPQTARQSCATLKQVFCSGEALPADLCREWQQLTGAPLHNLYGPTEAAVDVSWYPAFGEELAQVRGSSVPIGYPVWNTGLRILDAMMHPVPPGVAGDLYLTGIQLAQGYLGRPDLTASRFIADPFAPGERMYRTGDVARWLDNGAVEYLGRSDDQLKIRGQRIELGEIDRVMQALPDVEQAVASCAIAREDIPGNKHLVAYIVPQEEQTCTERSRSTLTVSFVRSFLKEKLPEYMVPSAIVILDALPLTPNGKLDRRALPAPDLHSQLETIIAAAFSSLLGCDVQDADADFFALGGHSLLAMKLAAQLSRQVARQVTPGQVMVASTVAKLATIIDAELDKYVAPRNPITSGEDNPIPLCQGDGEEMSTWLRRFGPPVEHRARLVCFPHAGAAADSYLDLARALAPEIDVHAVQYPGRQDRRDEEPLGTAGEIADEVAAVLRASGGDGPFALFGHSMGALIAYETARRLEREPGGGPLRLFVSGQTAPRVHERRTDLPGDDGLVDELRRLGTSEAALADEALLAMSLPVLRADYRVLRSYAWADGPPLRAGITALCGDADPLTATGDAERWLQHSVIPGRTRTFPGGHFYLGEQVTEVAGAVRRDLLRAGLAG

What is claimed is:

1. A construct, comprising:
a non-naturally occurring polypeptide having a formula represented by (X—B)ₙ—Z, wherein:
X comprises at least one polypeptide encoding at least one domain of a first target protein;
Z comprises at least one polypeptide encoding at least one domain of a second target protein;
B comprises a polypeptide for linking X and/or Z; and
n is a number from 1 to 100;
wherein the non-naturally occurring polypeptide having (X—B)ₙ—Z as a formula is capable of synthesizing a secondary metabolite in a cell or organism.

2. The construct according to claim 1, wherein the at least one domain comprises at least one catalytic of the first target protein or the second target protein.

3. The construct according to any one of the preceding claims, wherein the first target protein comprises a megasynthase, a polyketide synthase, a non-ribosomal peptide synthase, and/or hybrid thereof.

4. The construct according to any one of the preceding claims, wherein the second target protein comprises a megasynthase, a polyketide synthase, a non-ribosomal peptide synthase, and/or hybrid thereof.

5. The construct according to any one of the preceding claims, wherein the construct comprises a modular megasynthase.

6. The construct according to any one of the preceding claims, wherein the first target protein and the second target protein are the same protein.

7. The construct according to any one of the preceding claims, wherein X comprises a polypeptide sequence of at least one domain selected from the group consisting of: Acyltransferase (AT), Acyl Carrier Protein (ACP), Keto-Synthase (KS), Ketoreductase (KR), Dehydratase (DH), Enoylreductase (ER), Methyltransferase (MT), Sulfhydrolase (SH), and Thioesterase (TE).

8. The construct according to any one of the preceding claims, wherein Z comprises a polypeptide sequence of at least one domain selected from the group consisting of: Acyltransferase (AT), Acyl Carrier Protein (ACP), Keto-Synthase (KS), Ketoreductase (KR), Dehydratase (DH), Enoylreductase (ER), Methyltransferase (MT), Sulfhydrolase (SH), and Thioesterase (TE).

9. The construct according to any one of the preceding claims, wherein B comprises a polypeptide sequence selected from the group consisting of: Acyl Carrier Protein-Condensation Domain linkers (ACP Condensation), Acyl Carrier Protein-Heterocyclization Domain linkers (ACP Heterocyclization), Acyl Carrier Protein-Ketosynthase Domain linkers (AC-PKS), Acyl Carrier Protein-Thioesterase Domain linkers (ACP-TE), Adenylation Domain-Peptide Carrier Protein linkers (A-PCP), Acyltransferase Domain-Acyl Carrier Protein linkers (AT-ACP), Acyltransferase Domain-Dehydratase Domain linkers (AT-DH), Acyltransferase Domain-Ketoreductase Domain linkers (AT-KR), Condensation Domain-Adenylation Domain linkers (Condensation A), Dehydratase Domain-Enoylreductase Domain linkers (DH-ER), Dehydratase Domain-Ketoreductase Domain linkers (DH-KR), Dual Condensation/Epimerization Domain-Adenylation Domain linkers (Dual Condensation A), Enoylreductase Domain-Ketoreductase Domain linkers (ER-KR), Heterocyclization Domain-Adenylation Domain linkers (Heterocyclization A), (Both Acyl and Peptide) Carrier Protein-Condensation Domain linkers (Joint AC-PC), Ketoreducatse Domain-Acyl Carrier Protein linkers (KR-ACP), and Ketosynthase Domain-Acyltransferase Domain linkers (KS-AT).

10. The construct according to any one of the preceding claims, wherein the secondary metabolite comprises:

[chemical structure]

[chemical structure]

[chemical structure]

[chemical structure]

11. The construct according to any one of the preceding claims, wherein the secondary metabolite is selected from the group consisting of: delta-hexalactone, Rapanycin, Actinorhodin, Erythromycin A, 6-Methylsalicyclic acid, Aflatoxin B1, Rifamycin S, Lovastatin, Amphotericin B, and Monensin A.

12. The construct according to any one of the preceding claims, wherein the first target protein or the second target protein is a prokaryotic protein or a eukaryotic protein.

13. The construct according to any one of the preceding claims, the construct having the formula (X—B)ₙ—Z is a polypeptide having at least 95 percent identity to at least one polypeptide selected from the group consisting of the polypeptides represented by at least one of SEQ ID NOs: 33-64, 109, 111, 113, 115, 117, 119, 121, 123, 125, 127, 129, 131, 133, 135, 137, 139, 141, 143.

14. The construct according to any one of the preceding claims, wherein B comprises a polypeptide sequence represented by at least one of SEQ ID NOs: 70-71, 73-74, 76-79, 81-82, 84-86, 88-91, 93-96, 98-99, 101-107.

15. A non-naturally occurring polynucleotide comprising a polynucleotide encoding the construct of any one of the preceding claims.

16. The polynucleotide according to any one of claim 15, wherein the polynucleotide can be compiled together with other polynucleotides to make a library of one or more target proteins, secondary metabolites or a trait.

17. The polynucleotide according to claim 15 or 16, wherein the polynucleotide is a polynucleotide having at least 95 percent identity to at least one polynucleotide selected from the group consisting of the polynucleotides represented by at least one of SEQ ID NOs: 1-32, 108, 110, 112, 114, 116, 118, 120, 122, 124, 126, 128, 130, 132, 134, 136, 138, 140, 142.

18. A host for producing a construct according to any one of claims 1-14.

19. The host according to claim 18, wherein the host comprises Escherichia coli.

20. The host according to claim 18, wherein the construct produces a genetic modification to overcome a deleterious trait in a human gene where the human gene is homologous to an E. coli gene and wherein the deleterious trait is selectable.

21. A method for generating a construct, comprising:
obtaining at least one polynucleotide sequence encoding at least one domain of a first target protein and at least one polynucleotide sequence encoding at least one domain of a second target protein;
determining a linker polynucleotide that is capable of encoding a protein linking the at least one domain of the first target protein and the at least one domain of the second target protein; and
generating a polypeptide construct having the at least one polypeptide sequence encoding the first target protein and at least one polypeptide sequence encoding the second target protein and a polypeptide sequence encoding the linker polypeptide.

22. The method according to claim 21, wherein the step of determining the polynucleotide sequence encoding the linker polypeptide further comprising creating a gene cluster annotation of the target gene encoding the linker polypeptide.

23. The method according to any one of claims 21-22, further comprising converting the construct having the at least one polypeptide sequence and the linker sequence into at least one nucleotide sequence by using codon harmonization.

24. A method for generating a biopharmaceutical agent, comprising:
introducing into cells a vector that encodes a construct according to any one of claims 1-14;
obtaining viable cells expressing the vector; and
isolating the biopharmaceutical agent from the viable cells.

25. The method according to claim 24, further comprising: introducing a mutation into the cells, wherein the mutation causes a condition.

26. The method according to claim 25, wherein the condition comprises a genetic disease.

27. The method according to claim 26, wherein the genetic disease comprises a loss-of-function genetic disease or a gain-of-function genetic disease.

28. A method for generating an in vivo construct library comprising generating the polynucleotides according to claims 15 to 17, wherein each polynucleotide represents one genetic variation in a target gene of a target protein and the construct library comprises all naturally-occurring and non-natural amino acid residue changes of the target protein.

29. A method comprising:
assigning ranks pertaining to biological effects of genetic variations of a plurality of genes or genetic loci capable of coding for a target protein;
assigning ranks pertaining to the biological effect due to the genetic variations of the plurality of genes or genetic loci;
obtaining and analyzing one or more rank(s) of the genetic variations of the genes or genetic loci pertaining to a predetermined selection process;
obtaining one or more composite rank(s) based on the ranks of the biological effects as they pertain to the predetermined selection process and biological context rank; and
designing a genomically-engineered process, cell or organism based on the composite rank(s).

30. The method according to claim 29, wherein the biological effect comprises a modulation of the target gene.

31. The method according to claim 30, wherein the target gene comprises an enzyme and the modulation of the target gene comprises an increase in biological activity of the enzyme compared to a target gene not having the genetic variation.

32. The method according to claim 29, where the assigning comprises measuring the effect of the genetic variation on a specific trait.

33. A computer-readable medium having computer-readable instructions, which, when executed by a computer, cause the computer to carry out a method comprising:
receiving first gene(s) or genetic segment score representing a score of a biological effect or condition due to a genetic variation of a gene or gene segment of a target protein;
receiving at least a second gene(s) or genetic score representing a second score of another genetic variation of the target protein;
combining the scores; and
assigning a combined score related to one or more genetic variations in order to assess a value of the genetic variations related to a trait for the target protein.

34. The computer-readable medium of claim 33, further comprising designing a genomically-engineered organism or cell based on the composite scores for two or more genes or genetic loci.

35. The computer-readable medium of claim 33, wherein information related to more than one target gene can be received and assessed.

36. A system comprising:
a component for assessing a score of a genetic variation of genes or genetic segments pertaining to a trait of one or more target proteins; and
a component for reporting the score of the genetic variation of genes or genetic segments pertaining to a trait of one or more target proteins; and
a component for compiling the scores of one or more target proteins.

37. The system according to claim 36, wherein the genetic variation comprises a mutation, insertion, deletion or other genetic variation.

38. A library comprising the constructs of claims 1-14 and/or the polynucleotides of claims 15-17.

39. The library according to claim 38, wherein the library is a genomic library of a target microorganism.

40. The library according to any one of claims 38-39, wherein the constructs comprise all possible genetic variations together in a pool representing every mutated residue of the target protein.

41. A method for engineering a polypeptide construct comprising:
obtaining the polynucleotide according any one of claims 15 to 17;
obtaining one or more oligonucleotide sequences, each containing regions of homology to one or more target gene(s), and regions of genetic variation towards one or more target gene(s);
using the one or more oligonucleotide sequences to generate amplified constructs comprising regions of homology suitable for homologous recombination within the polynucleotide; and
using the amplified constructs to create a library of mutant target genes within the polypeptide construct.

42. The method according to claim 41, further comprising a traceable barcode positioned outside of the gene or the gene segment open reading frame in the amplified constructs, wherein the traceable barcode corresponds to or is quantitatively linked to a genetic variation of the gene or the gene segment.
